United States Patent Application Publication US 2004/0053245 A1 - sequence listing, part 2

SEQ ID NO: 2075 - protein, 588 aa, Homo sapiens
QISTEVSEAPVANDKPKTLVVKVQKKAADLPDRDTWKGRFDFLMSCVGYAIGLGNVWRFPYLCGKNGGGAFLIPYFLTLIFAGVPLFLLECSLGQYTSIGGLGVWKLAPMFKGVGLAAAVLSFWLNIYYIVIISWAIYYLYNSFTTTLPWKQCDNPWNTDRCFSNYSMVNTTNMTSAVVEFWERNMHQMTDGLDKPGQIRWPLAITLAIAWILVYFCIWKGVGWTGKVVYFSATYPYIMLIILFFRGVTLPGAKEGILFYITPNFRKLSDSEVWLDAATQIFFSYGLGLGSLIALGSYNSFHNNVYRDSIIVCCINSCTSMFAGFVIFSIVGFMAHVTKRSIADVAASGPGLAFLAYPEAVTQLPISPLWAILFFSMLLMLGIDSQFCTVEGFITALVDEYPRLLRNRRELFIAAVCIISYLIGLSNITQGGIYVFKLFDYYSASGMSLLFLVFFECVSISWFYGVNRFYDNIQEMVGSRPCIWWKLCWSFFTPIIVAGVFIFSAVQMTPLTMGNYVFPKWGQGVGWLMALSSMVLIPGYMAYMFLTLKGSLKQRIQVMVQPSEDIVRPENGPEQPQAGSSTSKEAYI

SEQ ID NO: 2076 - protein, 89 aa, Homo sapiens
PRRDPGRTPELRGSAPRKTGANMPVRRGHVAPQNTFLGTIIRKFEGQNKKFIIANARVQNCAIIYCNDGFCEMTGFSRPDVMQKPCTCD

SEQ ID NO: 2077 - protein, 90 aa, Homo sapiens
HASEYFFKLCSFQVFLSFPLATIVIDVGLVVIPLVKSPNVHYVYVLLLVLSGLLFYIPLIHFKIRLAWFEKMTCYLQLLFNICLPDVSEE

SEQ ID NO: 2078 - protein, 417 aa, Homo sapiens
IQASRASPYPRVKVDFALSCHEDLLAPISEPIEWKYHSPEEEISLGPACWLWDFLRRSQQAGFLLPLSGGVDSAATACLIYSMCCQVCEAVRSGNEEVLADVRTIVNQISYTPQDPRDLCGRILTTCYMASKNSSQETCTRARELAQQIGSHHISLNIDPAVKAVMGIFSLVTGKSPLFAAHGGSSRENLALQNVQARIRMVLAYLFAQLSLWSRGVHGGLLVLGSANVDESLLGYLTKYDCSSADINPIGGISKTDLRAFVQFCIQRFQLPALQSILLAPATAELEPLADGQVSQTDEEDMGMTYAELSVYGKLRKVAKMGPYSMFCKLLGMWRHICTPRQVADKVKRFFSKYSMNRHKMTTLTPAYHAENYSPEDNRFDLRPFLYNTSWPWQFRCIENQVLQLERAEPQSLDGVD

SEQ ID NO: 2079 - protein, 1992 aa, Homo sapiens
PGCAARLSRARAPGPGAAGAGRKRLADPGPPPASRRLRAPGSRPRLAPCTRRAAQPAHARMAPRAAGGAPLSARAAAASPPPFQTPPRCPVPLLLLLLLGAARAGALEIQRRFPSPTPTNNFALDGAAGTVYLAAVNRLYQLSGANLSLEAEAAVGPVPDSPLCHAPQLPQASCEHPRRLTDNYNKILQLDPGQGLVVVCGSIYQGFCQLRRRGNISAVAVRFPPAAPPAEPVTVFPSMLNVAANHPNASTVGLVLPPAAGAGGSRLLVGATYTGYGSSFFPRNRSLEDHRFENTPEIAIRSLDTRGDLAKLFTFDLNPSDDNILKIKQGAKEQHKLGFVSAFLHPSDPPPGAQSYAYLALNSEARAGDKESQARSLLARICLPHGAGGDAKKLTESYIQLGLQCAGGAGRGDLYSRLVSVFPARERLFAVFERPQGSPAARAAPAALCAFRFADVRAAIRAARTACFVEPAPDVVAVLDSVVQGTGPACERKLNIQLQPEQLDCGAAHLQHPLSILQPLKATPVFRAPGLTSVAVASVNNYTAVFLGTVNGRLLKINLNESMQVVSRRVVTVAYGEPVHHVMQFDPADSGYLYLMTSHQMARVKVAACNVHSTCGDCVGAADAYCGWCALETRCTLQQDCTNSSQQHFWTSASEGPSRCPAMTVLPSEIDVRQEYPGMILQISGSLPSLSGMEMACDYGNNIRTVARVPGPAFGHQIAYCNLLPRDQFPPFPPNQDHVTVEMSVRVNGRNIVKANFTIYDCSRTAQVYPHTACTSCLSAQWPCFWCSQQHSCVSNQSRCEASPNPTSPQDCPRTLLSPLAPVPTGGSQNILVPLANTAFFQGAALECSFGLEEIFEAVWVNESVVRCDQVVLHTTRKSQVFPLSLQLKGRPARFLDSPEPMTVMVYNCAMGSPDCSQCLGREDLGHLCMWSDGCRLRGPLQPMAGTCPAPEIRAIEPLSGPLDGGTLLTIRGRNLGRRLSDVAHGVWIGGVACEPLPDRYTVSEEIVCVTGPAPGPLSGVVTVNASKEGKSRDRFSYVLPLVHSLEPTMGPKAGGTRITIHGNDLHVGSELQVLVNDTDPCTELMRTDTSIACTMPEGALPAPVPVCVRFERRGCVHGNLTFWYMQNPVITAISPRRSPVSGGRTITVAGERFHMVQNVSMAVHHIGREPTLCKVLNSTLITCPSPGALSNASAPVDFFINGRAYADEVAVAEELLDPEEAQRGSRFRLDYLPNPQFSTAKREKWIKHHPGEPLTLVIHVSTKGAGKEQDSLGLQSHEYRVKIGQVSCDIQIVSDRIIHCSVNESLGAAVGQLPITIQVGNFNQTIATLQLGGSETAIIVSIVICSVLLLLSVVALFVFCTKSRRAERYWQKTLLQMEEMESQIREEIRKGFAELQTDMTDLTKELNRSQGIPFLEYKHFVTRTFFPKCSSLYEERYVLPSQTLNSQGSSQAQETHPLLGEWKIPESCRPNMEEGISLFSSLLDNKHFLIVFVHALEQQKDFAVRDRCSLASLLTIALHGKLEYYTSIMKELLVDLIDASAAKNPKLMLRRTESVVEKMLTNWMSICMYSCLRETVGEPFFLLLCAIKQQINKGSIDAITGKARYTLNEEWLLRENIEAKPRNLNVSFQGCGMDSLSVRAMDTDTLTQVKEKILEAFCKNVPYSQWPRAEDVDLEWFASSTQSYILRDLDDTSVVEDGRKKLNTLAHYKIPEGASLAMSLIDKKDNTLGRVKDLDTEKYFHLVLPTDELAEPKKSHRQSHRKKVLPEIYLTRLLSTKGTLQKFLDDLFKAILSIREDKPPLAVKYFFDFLEEQAEKRGISDPDTLHIWKTNSLPLRFWVNILKNPQFVFDIDKTDHIDACLSVIAQAFIDACSISDLQLGKDSPTNKLLYAKEIPEYRKIVQRYYKQIQDMTPLSEQEMNAHLAEESRKYQNEFNTNVAMAEIYKYAKRYRPQIMAALEANPTARRTQLQHKFEQVVALMEDNIYECYSEA

SEQ ID NO: 2080 - protein, 96 aa, Homo sapiens
QPSPLFHSHLETLQLLRTAQLPEQVSWPWGQVANGKGNQRNMGSPQPSLLAFERNLELQIMGLGYSLLMGKLRPRVAKDTLRVHRDSTPSPLTLKD

SEQ ID NO: 2081 - protein, 127 aa, Homo sapiens
FLKCMRKAFRSSKLLQVGYTPDGKDDYRWCFRVDEVNWTTWNTNVGIINEDPGNCEGVKRTLSFSLRSSRVSGRHWKNFALVPLLREASARDRQSAQPEEVYLRQFSGSLKPEDAEVFKSPAASGEK

SEQ ID NO: 2082 - protein, 64 aa, Homo sapiens
AQAESSTVASPEATAGPLCTRIPNVPPPTPIRPPGKLQAQLPCPSPVRFTSARIPPASRPQTKS

SEQ ID NO: 2083 - protein, 740 aa, Homo sapiens
AAGPPGLEAEGRAPESAGPGPGGDAAETPGLPPAHSGTLMMAFRDVTVQIANQNISVSSSTALSVANCLGAQTVQAPAEPAAGKAEQGETSGREAPEAPAVGREDASAEDSCAEAGASGAADGATAPKTEEEEEEEETAEVGRGAEAEAGDLEQLNRTSTSTKSAKSGSEASASASKDALQAMILSLPRYHCENPASCKSPTLSTDTLRKRLYRIGLNLFNINPDKGIQFLISRGFIPDTPIGVAHFLLQRKGLSRQMIGEFLGNSKKQFNRDVLDCVVDEMDFSSMELDEALRKFQAHIRVQGEAQKVERLIEAFSQRYCMCNPEVVQQFHNPDTIFILAFAIILLNTDMYSPNIKPDRKMMLEDFIRNLRGVDDGADIPRELVVGIYERIQQKELKSNEDHVTYVTKVEKSIVGMKTVLSVPHRRLVCCSRLFEVTDVNKLQKQAAHQREVFLFNDLLVILKLCPKKKSSSTYTFCKSVGLLGMQFQLFENEYYSHGITLVTPLSGSEKKQVLHFCALGSDEMQKFVEDLKESIAEVTELEQIRIEWELEKQQGTKTLSFKPCGAQGDPQSKQGSPTAKREAALRERPAESTVEVSIHNRLQTSQHNSGLGAERGAPVPPPDLQPSPPRQQTPPLPPPPPTPPGTLVQCQQIVKVIVLDKPCLARMEPLLSQALSCYTSSSSDSCGSTPLGGPGSPVKVTHQPPLPPPPPPYNHPHQFCPPGSLLHGHRYSSGSRSLV

SEQ ID NO: 2084 - protein, 118 aa, Homo sapiens
SSVMGDLVGQGLEEQIVARDENSWLIDGGTPIDDVMRVLDIDEFPQSGNYETIGGFMMFMLRKIPKRTDSVKFAGYKFEVVDIDNYRIDQLLVTRIDSKATALSPKLPDAKDKEESVA

SEQ ID NO: 2085 - protein, 419 aa, Homo sapiens
MVFSAVLTAFHTGTSNTTFVVYENTYMNITLPPPFQHPDLSPLLRYSFETMAPTGLSSLTVNSTAVPTTPAAFKSLNLPLQITLSAIMIFILFVSFLGNLVVCLMVYQKAAMRSAINILLASLAFADMLLAVLNMPFALVTILTTRWIFGKFFCRVSAMFFWLFVIEGVAILLIISIDRFLIIVQRQDKLNPYRAKVLIAVSWATSFCVAFPLAVGNPDLQIPSRAPQCVFGYTTNPGYQAYVILISLISFFIPFLVILYSFMGILNTLRHNALRIHSYPEGICLSQASKLGLMGLQRPFQMSIDMGFKTRAFTTILILFAVFIVCWAPFTTYSLVATFSKHFYYQHNFFEISTWLLWLCYLKSALNPLIYYWRIKKFHDACLDMMPKSFKFLPQLPGHTKRRIRPSAVYVCGEHRTVV

SEQ ID NO: 2086 - protein, 88 aa, Homo sapiens
FTRSDELARHYRTHTGEKRFSCPLCPKQFSRSDHLTKHARRHPTYHPDMIEYRGRRRTPRIDPPLTSEVESSASGSGPGPAPSFTTCL

SEQ ID NO: 2087 - protein, 173 aa, Homo sapiens
LTWPQLFLETLPELLHMSRPAEDGPSPGALVRRSSSLGYISKAEEYFLLKSRSDLMFEKQSERHGLARRLTTARRPPASSEQAQQELFNELKPAVDGANFIVNHMRDQNNYNEEKDSWNRVARTVDRLCLFVVTPVMVVGTAWIFLQGVYNQPPPQPFPGDPYSYNVQDKRFI

SEQ ID NO: 2088 - protein, 386 aa, Homo sapiens
LVVTAITAILAFPNEYTRMSTSELISELFNDCGLLDSSKLCDYENRFNTSKGGELPDRPAGVGVYSAMWQLALTLILKIVITIFTFGMKIPSGLFIPSMAVGAIAGRLLGVGMEQLAYYHQEWTVFNSWCSQGADCITPGLYAMVGAAACLGGVTRMTVSLVVIMFELTGGLEYIVPLMAAAMTSKWVADALGREGIYDAHIRLNGYPFLEAKEEFAHKTLAMDVMKPRRNDPLLTVLTQDSMTVEDVETIISETTYSGFPVVVSRESQRLVGFVLRRDLIISIENARKKQDGVVSTSIIYFTEHSPPLPPYTPPTLKLRNILDLSPFTVTDLTPMEIVVDIFRKLGLRQCLVTHNGRLLGIITKKDVLKHIAQMANQDPDSILFN

SEQ ID NO: 2089 - protein, 304 aa, Homo sapiens
TLQLAASVPFFAISLISWWLPESARWLIINGKPDQALQELRKVARINGHKEAKNLTIEVLMSSVKEEVASAKEPRSVLDLFCVPVLRWRSCAMLVVNFSLLISYYGLVFDLQSLGRDIFLLQALFGAVDFLGRATTALLLSFLGRRTIQAGSQAMAGLAILANMLVPQDLQTLRVVFAVLGKGCFGISLTCLTIYKAELFPTPVRMTADGILHTVGRLGAMMGPLILMSRQALPLLPPLLYGVISIASSLVVLFFLPETQGLPLPDTIQDLESQKSTAAQGNRQEAFTVESTSLLEIVALHGAL

SEQ ID NO: 2090 - protein, 141 aa, Homo sapiens
RPIKTLGIGFHFSVDGVHFLTQREVQNLWKENLIILDTAKKHGYEVVDTFTITMGRYKEFLQGKCGCHFHEVVKSKLSKEYNFIKMKRSRNHIMGRYFSNQSKLQQGTVTNFRSPYHVRGPINQVCSEILLSRMCANKRTM

SEQ ID NO: 2091 - protein, 136 aa, Homo sapiens
RMPESTLLIICENGYILEAPLPTIKQEEDDHDVVSYEIKDMCIKCFHFSSVKSKILRLIEIEKRERQRELKEKIREERRNKLAAEMGEDGEKEFQEEEEEKEEEEEEEEPLPEIFIPSTPSPILCGFYSEPGKFWV

SEQ ID NO: 2092 - protein, 160 aa, Homo sapiens
MGCRLLCCVVFCLLQAGPLDTAVSQTPKYLVTQMGNDKSIKCEQNLGHDTMYWYKQDSKKFLKIMFSYNNKELIINETVPNRFSPKSPDKAHLNLHINSLELGDSAVYFCASSQDTALQSHCIPVHKPPGSARKLQGSVCTCTQGSSLHSLMASDGVPVC

SEQ ID NO: 2093 - protein, 522 aa, Homo sapiens
MNSFFGTPAASWCLLESDVSSAPDKEAGRERRALSVQQRGGPAWSGSLEWSRQSAGDRRRLGLSRQTAKSSWSRSRDRTCCCRRAWWILVPAADRARRERFIMNEKWDTNSSENWHPIWNVNDTKHHLYSDINITYVNYYLHQPQVAAIFIISYFLIFFLCMMGNTVVCFIVMRNKHMHTVTNLFILNLAISDLLVGIFCMPITLLDNIIAGWPFGNTMCKISGLVQGISVAASVFTLVAIAVDRFQCVVYPFKPKLTIKTAFVIIMIIWVLAITIMSPSAVMLHVQEEKYYRVRLNSQNKTSPVYWCREDWPNQEMRKIYTTVLFANIYLAPLSLIVIMYGRIGISLFRAAVPHTGRKNQEQWHVVSRKKQKIIKMLLIVALLFILSWLPLWTLMMLSDYADLSPNELQIINIYIYPFAHWLAFGNSSVNPIIYGFFNENFRRGFQEAFQLQLCQKRAKPMEAYALKAKSHVLINTSNQLVQESTFQNPHGETLLYRKSAEKPQQELVMEELKETTNSSEI

SEQ ID NO: 2094 - protein, 59 aa, Homo sapiens
SHVCVSHYAGSSGCPAGAGAGAVALGISAVALYDYQGGRLGVARGAWYMEAPDIRQGDM

SEQ ID NO: 2095 - protein, 147 aa, Homo sapiens
GAPHTDWAWAPTPMSGLGSGRGRQGTLASSPLSLPLLLAGVTGILATELFDQMARPAACMVCGALMWIMLILVGLGFPFIMEALSHFLYVPFLGVCVCGAIYTGLFLPETKGKTFQEISKELHRLNFPRRAQGPTWRSLEVIQSTEL

SEQ ID NO: 2096 - protein, 446 aa, Homo sapiens
AQTARRIIGLELDTEGHRLFVAFSGCIVYLPLSRCARHGACQRSCLASQDPYCGWHSSRGCVDIRGSGGTDVDQAGNQESMEHGDCQDGATGSQSGPGDSAYGVRRDLPPASASRSVPIPLLLASVAAAFALGASVSGLLVSCACRRAHRRRGKDIETPGLPRPLSLRSLARLHGGGPEPPPPSKDGDAVQTPQLYTTFLPPPEGVPPPELACLPTPESTPELPVKHLRAAGDPWEWNQNRNNAKEGPGRSRGGHAAGGPAPRVLVRPPPPGCPGQAVEVTTLEELLRYLHGPQPPRKGAEPPAPLTSRALPPEPAPALLGGPSPRPHECASPLRLDVPPEGRCASAPARPALSAPAPRLGVGGGRRLPFSGHRAPPALLTRVPSGGPSRYSGGPGKHLLYLGRPEGYRGRALKRVDVEKPQLSLKPPLVGPSSRQAVPNGGRFNF

SEQ ID NO: 2097 - protein, 250 aa, Homo sapiens
DHASLPCSWNHRFDVETRHVFIGDHSGQVTILKLEQENCTLVTTFRGHTGGVTALCWDPVQRVLFSGSSDHSVIMWDIGGRKGTAIELQGHNDRVQALSYAQHTRQLISCGGDGGIVVWNMDVERQETPEWLDSDSCQKCDQPFFWNFKQMWDSKKIGLRQHHCRKCGKAVCGKCSSKRSSIPLMGFEFEVRVCDSCHEAITDEERAPTATFHDSKHNIVHVHFDATRGWLLTSGTDKVIKLWDMTPVVS

SEQ ID NO: 2098 - protein, 248 aa, Homo sapiens
AMVFGGVVPYVPQYRDIRRTQNADGFSTYVCLVLLVANILRILFWFGRRFESPLLWQSAIMILTMLLMLKLCTEVRVANELNARRRSFTAADSKDEEVKVAPRRSFLDFDPHHFWQWSSFSDYVQCVLAFTGVAGYITYLSIDSALFVETLGFLAVLTEAMLGVPQLYRNHRHQSTEGMSIKMVLMWTSGDAFKTAYFLLKGAPLQFSVCGLLQVLVDLAILGQAYAFARHPQKPAPHAVHPTGTKAL

SEQ ID NO: 2099 - protein, 148 aa, Homo sapiens
GRPDRSELVRMHILEETFAEPSLQATQMKLKRARLADDLNEKIAQRPGPMELVEKNILPVDSSVKEAIIGVGKEDYPHTQGDFSFDEDSSDALSPDQPASQESQGSAASPSEPKVSESPSPVTTNTPAQFASVSPTVPEFLKTPPTAD

SEQ ID NO: 2100 - protein, 142 aa, Homo sapiens
LLTQAMLVLPHRPQWFTPGPRLQAQGPCQEGWRWELRLRNYVPEDEDLNKRRVPQAKPDAVQEKVKEQLEAAKPEPVIEEVDLAKLAPRKPDWDLKRDVAKKLEKLLKRTQRAIAELIRERLKGQEDSLDSAVDAATEHKTC

SEQ ID NO: 2101 - protein, 415 aa, Homo sapiens
TDQAKVDNQPEKLVRSAEDVSTVPTQPDNPFSHPDKLKRMSKSVPAFLQDESDDRETDTASESSYQLSRHKKSPSSLTNLSSSSGMTSLSSVSGSVMSVYSGDFGNLEVKGNIQFAIEYVESLKELHVFVAQCKDLAAADVKKQRSDPYVKAYLLPDKGKMGKKKTLVVKKTLNPVYNEILRYKIEKQILKTQKLNLSIWHRDTFKRNSFLGEVELDLETWDWDNKQNKQLRWYPLKRKTAPVALEAENRGEMKLALQYVPEPVPGKKLPTTGEVHIWVKECLDLPLLRGSHLNSFVKCTILPDTSRKSRQKTRAVGKTTNPIFNHTMVYDGFRPEDLMEACVELTVWDHYKLTNQFLGGLRIGFGTGKSYGTEVDWMDSTSEEVALWEKMVNSPNTWIEATLPLRMLLIAKISK

SEQ ID NO: 2102 - protein, 391 aa, Homo sapiens
KEIFSPFELISVKPLCLLLGVTCSQSMAFEELLSQVGGLGRFQMLHLVFILPSLMLLIPHILLENFAAAIPGHRCWVHMLDNNTGSGNETGILSEDALLRISIPLDSNLRPEKCRRFVHPQWQLLHLNGTIHSTSEADTEPCVDGWVYDQSYFPSTIVTKWDLVCDYQSLKSVVQFLLLTGMLVGGIIGGHVSDRFGRRFILRWGLLQLAITDTCAAFAPTFPVYCVLRFLAGFSSMIIISNNSLPITEWIRPNSKALVVILSSGALNIGQIILGGLAYVFRDWQTLHVVASVPFFVFFLLSRWLVESARWLIITNKLDEGLKALRKVARTNGIKNAEETLNIEVVRSTMQEELDAAQTKTTVWDLFRNPSMRKRICILVFLRKKNLKEKA

SEQ ID NO: 2103 - protein, 490 aa, Homo sapiens
DSFESILRLIFEIHHSGEKGDIVVFLACEQDIEKVCETVYQGSNLNPDLGELVVVPLYPKEKCSLFKPLDETEKRCQVYQRRVVLTTSSGEFLIWSNSVRFVIDVGVERRKVYNPRIRANSLVMQPISQSQAEIRKQILGSSSSGKFFCLYTEEFASKDMTPLKPAEMQEANLTSMVLFMKRIDIAGLGHCDFMNRPAPESLMQALEDLDYLAALDNDGNLSEFGIIMSEFPLDPQLSKSILASCEFDCVDEVLTIAAMVTAPNCFSHVPHGAEEAALTCWKTFLHPEGDHFTLISIYKAYQDTTLNSSSEYCVEKWCRDYFLNCSALRMADVIRAELLEIIKRIELPYAEPAFGSKENTLNIKKALLSGYFMQIARDVDGSGNYLMLTHKQVAQLHPLSGYSITKKMPEWVLFHKFSISENNYIRITSEISPELFMQLVPQYYFSNLPPSESKDILQQVVDHLSPVSTMNKEQQMCETCPETEQRCTLQ

SEQ ID NO: 2104 - protein, 131 aa, Homo sapiens
YYALHHWPFPDLLCQTTGAIFQMNMYGSCIFLMLINVDRYAAIVHPLRLRHLRRPRVARLLCLGVWALILVFAVPAARVHRPSRCRYRDLEVRLCFESFSDELWKGRLLPLVLLAEALGFLLPLAAVVYSS

SEQ ID NO: 2105 - protein, 597 aa, Homo sapiens
LGLGSGTLLSVSEYKKKYREHVLQLHARVKERNARSVKITKRFTKLLIAPESAAPEEALGPAEEPEPGRARRSDTHTFNRLFRRDEEGRRPLTVVLQGPAGIGKTMAAKKILYDWAAGKLYQGQVDFAFFMPCGELLERPGTRSLADLILDQCPDRGAPVPQMLAQPQRLLFILDGADELPALGGPEAAPCTDPFEAASGARVLGGLLSKALLPTALLLVTTRAAAPGRLQGRLCSPQCAEVRGFSDKDKKKYFYKFFRDERRAERAYRFVKENETLFALCFVPFVCWIVCTVLRQQLELGRDLSRTSKTTTSVYLLFITSVLSSAPVADGPRLQGDLRNLCRLAREGVLGRRAQFAEKELEQLELRGSKVQTLFLSKKELPGVLETEVTYQFIDQSFQEFLAALSYLLEDGGVPRTAAGGVGTLLRGDAQPHSHLVLTTRFLFGLLSAERMRDIERHFGCMVSERVKQEALRWVQGQGQGCPGVAPEVTEGAKGLEDTEEPEEEEEGEEPNYPLELLYCLYETQEDAFVRQALCRFPELALQRVRFCRMDVAVLSYCVRCCPAGQALRLISCRLVAAQEKKKKSLGKRLQASLGGG

SEQ ID NO: 2106 - protein, 141 aa, Homo sapiens
SGRPTRPAKPTGQGMGRFMLTLVCQGSIMMSARDLIMNNLTELQPGLFHHLRFLEELRLSGNHLSHIPGQAFSGLYSLKILMLHNNQLGGIPAQALWELPSLQSLRLDANLISLVPERSFEGLSSLRHLWLDDNALTEIPS

SEQ ID NO: 2107 - protein, 121 aa, Homo sapiens
ITPLGLGAADMCAFPWLLLLLLLQEGSQRRLWRWCGSEEVVAVLQESISLPLEIPPDEEVENIIWSSHKSLATVVPGKEGHPATIMVTNPHYQGQILTMLLRSLQQPSASWPRDCSSSCSW

SEQ ID NO: 2108 - protein, 104 aa, Homo sapiens
IGISCPATIFVPMFSHSLIGIGEEYQLPYYNMVPSDPSYEDMREVVCVKRLRPIVSNRWNSDECLRAVLKLMSECWAHNPASRLTALRIKKTLAKMVESQDVKI

SEQ ID NO: 2109 - protein, 216 aa, Homo sapiens
PGRRFRPAALEERAMEKLREKVPFQNRGKGTLSSIIPNNSDTRKATETTSLSSKPEYVNPDFRWSKDPSSKSGNLLETSEVGWTSNPEELDPIRLALLGKSGLSCQVGSATSHPVSCQEPIDEDQRISPKDKSTAGREFSGQVSHQTTSENQCTPIPSSTVHSSVADMQNMPAAVHALLTQPSLSAAPFAQRYLGTLPSTGSTTLPQCHAGNATVW

SEQ ID NO: 2110 - protein, 242 aa, Homo sapiens
PLRLTLMEEVLLLGLKDREGYTSFWNDCISSGLRGCMLIELPLRGRLQLEACGMRRKSLLTRKVICKSDAPTGDVLLDEALKHVKETQPPETVQNWIELLSGETWNPLKLHYQLRNVRERLAKNLVEKGVLTTEKQNFLLFDMTTHPLTNNNIKQRLIKKVQEAVLDKWVNDPHRMDRRLLALIYLAHASDVLENAFAPLLDEQYDLATKRVRQLLDLDPEVECLKANTNEVLWAVVAAFTK

SEQ ID NO: 2111 - protein, 147 aa, Homo sapiens
IVSFHLSGFKKFVRPFSFLSVHGLQVDEYHSVHQKLSADMADHSNLIRSLLVGAEDARLMRDMKTMKSRYMELYDLNRDLLNGYKIRWNNHTELLGNLKAVNQAIQRAGRLRVGKPKNQVITACRDAIRSNNINTLFKIMRVGTASS

SEQ ID NO: 2112 - protein, 894 aa, Homo sapiens
KKAITCGEKEKQDLIKSLAMLKDGFRTDRGSHSDLWSSSSSLESSSFPLPKQYLDVSSQTDISGSFGINSNNQLAEKVRLRLRYEEAKRRIANLKIQLAKLDSEAWPGVLDSERDRLILINEKEELLKEMRFISPRKWTQGEVEQLEMARKRLEKDLQAARDTQSKALTERLKLNSKRNQLVRELEEATRQVATLHSQLKSLSSSMQSLSSGSSPGSLTSSRGSLVASSLDSSTSASFTDLYYDPFEQLDSELQSKVEFLLLEGATGFRPSGCITTIHEDEVAKTQKAEGGGRLQALRSLSGTPKSMTSLSPRSSLSSPSPPCSPLMADPLLAGDAFLNSLEFEDPELSATLCELSLGNSAQERYRLEEPGTEGKQLGQAVNTAQGCGLKVACVSAAVSDESVAGDSGVYEASVQRLGASEAAAFDSDESEAVGATRIQIALKYDEKNKQFAILIIQLSNLSALLQQQDQKVNIRVAVLPCSESTTCLFRTRPLDASDTLVFNEVFWVSMSYPALHQKTLRVDVCTTDRSHLEECLGGAQISLAEVCRSGERSTRWYNLLSYKYLKKQSRELKPVGVMAPASGPASTDAVSALLEQTAVELEKRQEGRSSTQTLEDSWRYEETSENEAVAEEEEEEVEEEEGEEDVFTEKASPDMDGYPALKVDKETNTETPAPSPTVVRPKDRRVGTPSQGPFLRGSTIIRSKTFSPGPQSQYVCRLNRSDSDSSTLSKKPPFVRNSLERRSVRMKRPSPPPQPSSVKSLRSERLIRTSLDLELDLQATRTWHSQLTQEISVLKELKEQLEQAKSHGEKELPQWLREDERFRLLLRMLEKRMDRAEHMGELQTDKMMRAAAKDVHRLRGQSCKEPPEVQSFREKMAFFTRPRMNIPALSADDV

SEQ ID NO: 2113 - protein, 518 aa, Homo sapiens
PHPIRFSKLCVSFNNQEYNQFCVIEEASKANEVLENLTQGKMCLVPGKTRKLLFKFVAKTEDVGKKIEITSVDLALGNETGRCVVLNWQGGGGDAASSQEALQAARSFKRRPKLPDNEVHWGSIIIQASTMIISRVPNISVHLLHEPPALTNEMYCLVVTVQSHEKTQIRDVKLTAGLKPGQDANLTQKTHVTLHGTELCDESYPALLTDIPVGDLHPGEQLEKMLYVRCGTVGSRMFLVYVSYLINTTVEEKEIVCKCHKDETVTIETVFPFDVAVKFVSTKFEHLERVYADIPFLLMTDLLSASPWALTIVSSELHLAPSMTTVDQLESQVDNVILQTGESASECFCLQCPSLGNIEGGVATGHYIISWKRTSAMENIPIITTVITLPHVIVENIPLHVNADLPSFGRVRESLPVKYHLQNKTDLVQDVEISVEPSDAFMFSGLKQIRLRILPGTEQEMLYNFYPLMAGYQQLPSLNINLLRFPNFTNQLLRRFIPTSIFVKPQGRLMDDTSIAAA

SEQ ID NO: 2114 - protein, 474 aa, Homo sapiens
AAADLANSNAGAAVGRKAGPRSPPSAPAPAPPPPAPAPPTLGNNHQESPGWRCCRPTLRERNALMFNNELMADVHFVVGPPGATRTVPAHKYVLAVGSSVFYAMFYGDLAEVKSEIHIPDVEPAAFLILLKYMYSDEIDLEADTVLATLYAAKKYIVPALAKACVNFLETSLEAKNACVLLSQSRLFEEPELTQRCWEVIDAQAEMALRSEGFCEIDRQTLEIIVTREALNTKEAVVFEAVLNWAEAECKRQGLPITPRNKRHVLGRALYLVRIPTMTLEEFANGAAQSDILTLEETHSIFLWYTATNKPRLDFPLTKRKGLAPQRCHRFQSSAYRSNQWRYRGRCDSIQFAVDRRVFIAGLGLYGSSSGKAEYSVKIELKRLGVVLAQNLTKFMSDGSSNTFPVWFEHPVQVEQDTFYTASAVLDGSELSYFGQEGMTEVQCGKVAFQFQCSSDSTNGTGVQGGQIPELIFYA

SEQ ID NO: 2115 - protein, 383 aa, Homo sapiens
SGFTHYAIYDFIVKGSCFCNVHADQCIPVHGFRPVKAPGTFHMVHGKCMCKHNTAGSHCQHCAPLYNDRPWEAADGKTGAPNECRTCKCNGHADTCHFDVNVWEASGNRSGGVCDDCQHNTEGQYCQRCKPGFYRDLRRPFSAPDACKPCSCHPVGSAVLPANSVTFCDPSNGDCPCKPGVAGRRCDRCMVGYWGFGDYGCRPCDCAGSCDPITGDCISSHTDIDWYHEVPDFRPVHNKSEPPWEWEDAQGFSALLHSGKCECKEQTLGNAKAFCGMKYSYVLKIKILSAHDKGTHVEVNVKIKKVLKSTKLKIFRGKRTLYPESWTDRGCTCPILNPGLEYLVAGHEDIRTGKLIVNMKSFVQHWKPSLGRKVMDILKRECK

SEQ ID NO: 2116 - protein, 127 aa, Homo sapiens
MTAAATATVLKEGVLEKRSGGLLQLWKRKRCVLTERGLQLFEAKGTGGRPKELSFARIKAVECVESTGRHIYFTLVTEGGGEIDFRCPLEDPGWNAQITLGLVKFKNQQAIQTVRARQSLGTGTLVS

SEQ ID NO: 2117 - protein, 180 aa, Homo sapiens
SGSSHASDGSGFQELRICSEDQTPLIAGMCSLPMARYYIIKYADQKALYTRDGQLLVGDPVADNCCAEKICTLPNRGLDRTKVPIFLGIQGGSRCLACVETEEGPSLQLEDVNIEELYKGGEEATRFTFFQSSSGSAFRLEAAAWPGWFLCGPAEPQQPVQLTKESEPSARTKFYFEQSW

SEQ ID NO: 2118 - protein, 96 aa, Homo sapiens
FILQAVLQLSSQEARYKAFGTCVSHIGAILAFYTPSVISSVMHRVARCAAPHVHILLANFYLLFPPMVNPIIYGVKTKQIRDSLGSIPEKGCVNRE

SEQ ID NO: 2119 - protein, 237 aa, Homo sapiens
RHEPSCSNGVASTKSKQNHSKYPAPSSSSSSSSSSSSSSPSSVNYSESNSTDSTKSQHHSSTSNQETSDSEMEMEAEHYPNGVLGSMSTRIVNGAYKHEDLQTDESSMDDRHPRRQLCGGNQAATERIILFGRELQALSEQLGREYGKNLAHTEMLQDAFSLLAYSDPWSCPVGQQLDPIQREPVCAALNSAILESQNLPKQPPLMLALGQASECLRLMARAGLGSCSFARVDDYLH

SEQ ID NO: 2120 - protein, 189 aa, Homo sapiens
YFGLNLHVQHLGNNVFLLQTLFGAVILLANCVAPWALKYMNRRASQMLLMFLLAICLLAIIFVPQEMQMLREVLATLGLGASALANTLAFAHGNEVIPTIIRARAMGINATFANIAGALAPLMMILSVYSPPLPWIIYGVFPFISGFAFLLLPETRNKPLFDTIQDEKNERKDPREPKQEDPRVEVTQF

SEQ ID NO: 2121 - protein, 185 aa, Homo sapiens
RSFVLDTASAICNYNAHYKNHPKYWCRGYFRDYCNIIAFSPNSTNHVALRDTGNQLIVTMSCLTKEDTGWYWCGIQRDFARDDMDFTELIVTDDKGTLANDFWSGKDLSGNKTRSCKAPKVVRKADRSRTSILIICILITGLGIISVISHLTKRRRSQRNRRVGNTLKPFSRVLTPKEMAPTEQM

SEQ ID NO: 2122 - protein, 268 aa, Homo sapiens
FVLGILALSHTISPFMNKFFPASFPNRQYQLLFTQGSGENKEEIINYEFDTKDLVCLGLSSIVGVWYLLRKHWIANNLFGLAFSLNGVELLHLNNVSTGCILLGGLFIYDVFWVFGTNVMVTVAKSFEAPIKLVFPQDLLEKGLEANNFAMLGLGDVVIPGIFIALLLRFDISLKKNTHTYFYTSFAAYIFGLGLTIFIMHIFKHAQPALLYLVPACIGFPVLVALAKGEVTEMFSYEESNPKDPAAVTESKEGTEASASKGLEKKEK

SEQ ID NO: 2123 - protein, 362 aa, Homo sapiens
CQPMLVTRKNHPKLLLRRTESVAEKMLTNWFTFLLYKFLKESAGEPLFMLYCAIKHQMEKGPIDAITGEARYSLSEDKLIRHLIDYKTLTLNCVNPENENAPEVPVKGLDCDTGTQAKEKLLDAAYKGVPYSQRPKAADMDLEWRQGRMARIILQDEDVTTKIDNDWKRLNTLAHYQVTDGSSVALVPKQTSAYNISNSSTFTKSLSRYESMLRTASSPDSLRSRTPMITPDLESGTKLWHLVKNHDHLDQREGDRGSKMVSEIYLTRLLATKGTLQKFVDDLFETIFSTAHRGSALPLAIKYMFDFLDEQADKHQIHDADVRHTWKSNCLPLRFWVNVIKNPQFVFDIHKNSITDACLSVV

SEQ ID NO: 2124 - protein, 245 aa, Homo sapiens
KTAVKKRNLNPVFNETLRYSVPQAELQGRVLSLSVWHRESLGRNIFLGEVEVPLDTWDWGSEPTWLPLQPRVPPSPDDLPSRGLLALSLKYVPAGSEGAGLPPSGELHFWVKEARDLLPLRAGSLDTYVQCFVLPDDSRASRQRTRVVRRSLSPVFNHTMVYDGFGPADLRQACAELSLWDHGALANRQLGGTRLSLGTGSSYGLQVPWMDSTPEEKQLWQALLEQPCEWVDGLLPLRTNLAPRT

SEQ ID NO: 2125 - protein, 129 aa, Homo sapiens
  misc_feature (1)...(129): Xaa = any amino acid or nothing
ARGIGSLGRDHSGSGGGTGMAGAWVRKAADYVRSKDFRDYLMSTHFWGPVANWGLPIAAITDMKKSPEIISRRMTFALXCYSLTFVRFAHYVQPWNWLMLGCHTAVDFDQLISSMPCISHGMTASASAL

SEQ ID NO: 2126 - protein, 275 aa, Homo sapiens
  misc_feature (1)...(275): Xaa = any amino acid or nothing
FRGYWGVREAFTDASWSGGLGPGKPGMKITRQKHAKKHLGFFRNNFGVREPYQILLDGTFCQAALRGRIQLREQLPRYLMGETQLCTTRCVLKELETLGKDLYGAKLIAQKCQVRNCPHFKNAVSGSECLLSMVEEGNPHHYFVATQDQNLSVKVKKKPGVPLMFIIQNTMVLDKPSPKTIAFVKAVESGRLSQCMRKKVSNISKRNRVXXKTLNRGRRKKRKKISGPNPLSCLKKKKKAPDTQSSASEKKRKRKRIRNRSNPKVLSEKQNAEGE

SEQ ID NO: 2127 - protein, 122 aa, Homo sapiens
  misc_feature (1)...(122): Xaa = any amino acid or nothing
YYQISSLPSIVGNGIFLWLLICIFLAKQGGSRLXFQPFGRPRGGGHLRSGVLGQPGQHGETPSFFYNSKISPALWGPPVIPSALGGEAGKSLXPRRQRFQRGGIAPLPSRVRGRAKLFLKKK

SEQ ID NO: 2128 - protein, 162 aa, Homo sapiens
  misc_feature (1)...(162): Xaa = any amino acid or nothing
ASFFHHHRGAFLLLLAIPGSXGQDQSLIHWSNAVSNADLLDLKNXLDHLEEKMPLEVKVVPPQVLSEPNXRSGGCFSAPSFEVPPWTGEVKPSPQRDGGALGQGPLGIPSDSILALLKKQTXRALLNWPLGSLRRSSCFGGQDGQDLKPRSGLGCNSFRYRR

SEQ ID NO: 2129 - protein, 129 aa, Homo sapiens
  misc_feature (1)...(129): Xaa = any amino acid or nothing
ARAPSPSFSVRDVELSDPARERGEMPVAVGPYGQSQPSCFDRVKMGFVMGCAVGMAAGALFGTFSCLSSILVSSSGSGMRGRELMGGIGKTMMQSGGTFGTFMAIGMGIRCXPWLPTTSVPSHQSQPMY

SEQ ID NO: 2130 - protein, 322 aa, Homo sapiens
  misc_feature (1)...(322): Xaa = any amino acid or nothing
RIMRMCDRGIQMLITTVGAFAAFSLMTIAVGTDYWLYSRGVCRTKSTSDNETSRKNEEVMTHSGLWRTCCLEGAFRGVCKKIDHFPEDADYEQDTAEYLLRAVRASSVFPILSVTLLFFGGLCVAASEFHRSRHNVILSAGIFFVSAGLSNIIGIIVYISANAGRTPGQRDSKKSYSYGWSFYFSGAFSFIIGRIICXGVGLPWHIYIEKHQQLRAKSHSEFLKKSTFARLPPYRYRFRRRSSSRSTEPRSRDLSPISKGFHTIPSTDISMFTLSRDPSKITMGTLLNSDRDHAFLQFHNSTPKEFKESLHNNPANRRTTPV

SEQ ID NO: 2131 - protein, 172 aa, Homo sapiens
RIIKVKDLKQTLAIKTAYPRCKCLVEMDQIFHLQVKQKQLACLCTWQARDPDCPPSTKVVLLVGPGMGCMVALFQDSIAWSNKSMPSSLSAISQSPCQVQAPEGPSSFHLPTLSFTTCLSWQGGDLEFLGDLKGCSELKNFQELITQSALVHPKADVWWYCGRPLLGTLPSN

SEQ ID NO: 2132 - protein, 310 aa, Homo sapiens
  misc_feature (1)...(310): Xaa = any amino acid or nothing
WISLPSSLLCRKNGSSAEDDRRGEPSAEEAEGEREDWGIGSAXSVGAVSKVPSARFXRTYPSEDEEEVTHQKSSSSDSNSEEHRKKKTSRSRNKKKRKNKSSKRKHRKYSDSDSNSESDTNSDSDDDKKRVKAKKKKKKKKHKTKKKKNKKTKKESSDSSCKDSEEDLSEATWMEQPNVADTMDLIGPEAPIIHTSQDEKPLKYGHALLPGEGAAMAEYVKAGKRIPRRGEIGLTSEEIGSFECSGYVMSGSRHRRMEAVRLRKENQIYSADEKRALASFNQEERRKRESKILASFREMVHKKTKGKDDK

SEQ ID NO: 2133 - protein, 276 aa, Homo sapiens
  misc_feature (1)...(276): Xaa = any amino acid or nothing
WDDYPQGALRRREAAEGLHFLGPPGRVRGQLRGITGPAWYCHSPSHSLLSAFCHLPTPSRCPAMARPPVPGSVVVPNWHESRRGQGVPGLHSAQEPPAGVWAAXAASAAAALSIDTASYKIFVSGKSGVGKTALVAKLAGLEVPVVHHETTGIQTTVVFWPAKLQASSRVVMFRFEFWDCGESALKKFDHMLLACMENTDAFLFLFSFTDRASFEDLPGQLARIAGEAPGVVRMVIGSKFDQYMHTDVPERDLTAFRQAWELPLLRVKSVPGRRLG

SEQ ID NO: 2134 - protein, 510 aa, Homo sapiens
  misc_feature (1)...(510): Xaa = any amino acid or nothing
GSSPDPASLITMKNQDKKNGAAKQSNPKSSPGQPEAGPEGAQERPSQAAPAVEAEGPGSSQAPRKPEGAQARTAQSGALRDVSEELSRQLEDILSTYCVDNNQGGPGEDGAQGEPAEPEDAEKSRTYVARNGEPEPTPVVNGEKEPSKGDPNTEEIRQSDEVGDRDHRRPQEKKKAKGLGKEITLLMQTLNTLSTPEEKLAALCKKYAELLEEHRNSQKQMKLLQKKQSQLVQEKDHLRGEHSKAVLARSKLESLCRELQRHNRSLKEEGVQRAREEEEKRKEVTSHFQVTLNDIQLQMEQHNERNSKLRQENMELAERLKKLIEQYELREEHIDKVFKHKDLQQQLVDAKLQQAQEMLKEAEERHQREKDFLLKEAVESQRMCELMKQQETHLKQQLALYTEKFEEFQNTLSKSSEVFTTFKQEMEKMTKKIKKLEKETTMYRSRWESSNKALLEMAEEKTVRDKELEGLQVKIQRLEKLCRALQTGAQXPVRGQRWGSHRTSAVRIFS

SEQ ID NO: 2135 - protein, 201 aa, Homo sapiens
  misc_feature (1)...(201): Xaa = any amino acid or nothing
SPQGPLLRSVSPVSAGASSVTPGGAQPGVTTTPPSLVAVAPAPGSAAGPAAGWQXHAGCRWTKLPWSWGMRPMKIFFSEEYRSISTRISHDALXEKCTQPAKPLSMIRTGSSVSPGPLVKWNWTRREFRNSGTRVVSSCCGMSCMYSFLGHCSVSQDLPLVHVDVGWQPPLGPTVGLRPGLLPLHDTTPCQKLVVDDLDWA

SEQ ID NO: 2136 - protein, 140 aa, Homo sapiens
  misc_feature (1)...(140): Xaa = any amino acid or nothing
RWLPVAECDSSCVGCTGEGPGNCKECISGYAREHGQCADVDECSLAEKTCVRKNENCYNTPGSYVCVCPDGFEETRRCLCAAGRGXSHRRRKPDTAALPRRPVMCRTYPLNYSEGCPVENVALRMPSPAVDSGGERLPAL

SEQ ID NO: 2137 - protein, 489 aa, Homo sapiens
  misc_feature (1)...(489): Xaa = any amino acid or nothing
DYVLTAELHRQRSPGVSFGLSVFNLMNAIMGSGILGLAYVMANTGVFGFSFLLLTVALLASYSVHLLLSMCIQTAYLGPXTNYFMVLPAHXLTCLPLIEFLQSLXNSLXAVTSYEDLGLFAFGLPGKLVVAGTIIIQNIGAMSSYLLIIKTELPAAIAEFLTGDYSRYWYLDGQTLLIIICVGIVFPLALLPKIGFLGYTSSLSFFFMMFFALVVIIKKWSIPCPLTLNYVEKGFQISNVTDDCKPKLFHFSKESAYALPTMAFSFLCHTSILPIYCELQSPSKKRMQNVTNTAIALSFLIYFISALFGYLTFYDGTTKAQRGEVTCHRIKDKVESELLKGXXXIPXSHDVVVMTVKLCILFAVLLTVPLIHFPARKAVTMMFFSNFPFSWIRHFLITLALNIIIVLLAIYVPDIRNVFGVVGASTSTCLIFIFPGLFYLKLSREDFLSWKKLGVGCFCLLSFKTSILRNSLSVYIILPASRKSIYFKI

SEQ ID NO: 2138 - protein, 2204 aa, Homo sapiens
  misc_feature (1)...(2204): Xaa = any amino acid or nothing
PRSLCFSLWAEAAVLADGGLRRRRRLLRGTMSASFVPNGASLEDCHCNLFCLADLTGIKWKKYVWQGPTSAPILFPVTEEDPILSSFSRCLKADVLGVWRRDQRPERRELXIFWGGEDPVLLTLFTMTYQKKKMECGRMDFPMNAVLCFSKAVHNLLERCLMNRNFVRIGKWFVKPYEKDEKPINKSEHLSCSFTFFLHGDSNVCTSVEINQHQPVYLLSEEHITLAQQSNSPFQVILCPFGLNGTLTGQAFKMSDSATKKLIGEWKQFYPISCCLKEMSEEKQEDMDWEDDSLAAVEVLVAGVRMIYPACFVLVPQSDIPTPSPVGSTHCSSSCLGVHQVPASTRDPAMSSVTLTPPTSPEEVQTVDPQSVQKWVKFSSVSDGFNSDSTSHHGGKIPRKLANHVVDRVWQECNMNRAQNKRKYSASSGGLCEEATAAKVASWDFVEATQRTNCSCLRHKNLKSRNAGQQGQAPSLGQQQQILPKHKTNEKQEKSEKPQKRPLTPFHHRVSVSDDVGMDADSASQRLVISAPDSQVRFSNIRTNDVAKTPQMHGTEMANSPQPPPLSPHPCDVVDEGVTKTPSTPQSQHFYQMPTPDPLVPSKPMEDRIDSLSQSFPPQYQEAVEPTVYVGTAVNLEEDEANIAWKYYKFPKKKDVEFLPPQLPSDKFKDDPVGPFGQESVTSVTELMVQCKKPLKVSDELVQQYQIKNQCLSAIASDAEQEPKIDPYAFVEGDEEFLFPDKKDRQNSEREAGKKHKVEDGTSSVTVLSHEEDAMSLFSPSIKQDAPRPTSHARPPSTSLIYDSDLAVSYTDLDNLFNSDEDELTPGSKRSANGSDDKASCKESKTGNLDPLSCISTADLHKMYPTPPSLEQHIMGFSPMNMNNKEYGSMDTTPGGTVLEGNSSSIGAQFKIEVDEGFCSPKPSEIKDFSYVYKPENCQILVGCSMFAPLKTLPSQYLPLIKLPEECIYRQSWTVGKLELLSSGPSMPFIKEGDGSNMDQEYGTAYTPQTHTSCGMPPSSAPPSNSGAGILPSPSTPRFPTPRTPRTPRTPRGAGGPASAQGSVKYENSDLYSPASTPSTCRPLNSVEPATVPSIPEAHSLYVNLILSESVMNLFKDCNSDSCCICVCNMNIKGADVGVYIPDPTQEAQYRCTCGFSAVMNRKFGNNSGLFFEDELDIIGRNTDCGKEAEKRFEALRATSAEHVNGGLKESEKLSDDLILLLQDQCTNLFSPFGAADQDPFPKSGVISNWVRVEERDCCNDCYLALEHGRQFMDNMSGGKVDEALVKSSCLHPWSKRNDVSMQCSQDILRMLLSLQPVLQDAIQKKRTVRPWGVQGPLTWQQFHKMAGRGSYGTDESPEPLPIPTFLLGYDYDYLVLSPFALPYWERLMLEPYGSQRDIAYVVLCPENEALLNGAKSFFRDLTAIYESCRLGQHRPVSRLLTDGIMRVGSTASKKLSEKLVAEWFSQAADGNNEAFSKLKLYAQVCRYDLGPYLASLPLDSSLLSQPNLVAPTSQSLITPPQMTNTGNANTPSATLASAASSTMTVTSGVAISTSVATANSTLTTASTSSSSSSNLNSGVSSNKLPSFPPFGSMNSNAAGSMSTQANTVQSGQLGGQQTSALQTAGISGESSSLPTQPHPDVSESTMDRDKVGIPTDGDSHAVTYPPAIVVYIIDPFTYENTDESTNSSSVWTLGLLRCFLEMVQTLPPHIKSTVSVQIIPCQYLLQPVKHEDREIYPQHLKSLAFSAFTQCRRPLPTSTNVKTLTGFGPGLAMETALRSPDRPECIRLYAPPFILAPVKDKQTELGETFGEAGQKYNVLFVGYCLSHDQRWILASCTDLYGELLETCIINIDVPNRARRKKSSARKFGLQKLWEWCLGLVQMSSLPWRVVIGRLGRIGHGELKDWSCLLSRRNLQSLSKRLKDMCRMCGISAADSPSILSACLVAMEPQGSFVIMPDSVSTGSVFGRSTTLNMQTSQLNTPQDTSCTHILVFPTSASVQVASATYTTENLDLAFNPNNDGADGMGIFDLLDTGDDLDPDIINILPASPTGSPVHSPGSHYPHGGDAGKGQSTDRLLSTEPHEEVPNILQQPLALGYFVSTAKAGPLPDWFWSACPQAQYQCPLFLKASLHLHVPSVQSDELLHSKHSHPLDSNQTSDVLRFVLEQYNALSWLTCDPATQDRRSCLPIHFVVLNQLYNFIMNML

SEQ ID NO: 2139 - protein, 666 aa, Homo sapiens
  misc_feature (1)...(666): Xaa = any amino acid or nothing
TGTLTEDGLDVMGVVPLKGQAFLPLVPEPRRLPVGPLLRALATCHALSRLQDTPVGDPMDLKMVESTGWVLEEEPAADSAFGTQVLAVMRPPLWEPQLQAMEEPPVPVSVLHRFPFSSALQRMSVVVAWPGATQPEAYVKGSPELVAGLCNPETVPTDFAQMLQSYTAAGYRVVALASKPLPSVPSLEAAQQLTRDTVEGDLSLLGLLVMRNLLKPQTTPVIQALRRTRIRAVMVTGDNLQTAVTVARGCGMVAPQEHLIIVHATHPERGQPASLEFLPMESPTAVNGVKDPDQAASYTVEPDPRSRHLALSGPTFGIIVKHFPKLLPKVLVQGTVFARMAPEQKTELVCELQKLQYCVGMCGDGANDCGALKAADVGISLSQAEASVVSPFTSSMASIECVPMVIREGRCSLDTSFSVFKYMALYSLTQFISVLILYTINTNLGDLQFLAIDLVITTTVAVLMSRTGPALVLGRVRPPGALLSVPVLSSLLLQMVLVTGVQLGGYFLTLAQPWFVPLNRTVAAPDNLPNYENTVVFSLSSFQYLILAAAVSKGAPFRRPLTNNVPFLLASALXSSVLVVLVLSPGLLHGPLALRNITDTGFKLLLVGLVTLNFVGGLHAGERARPVPPRLPAPPPAQAGSKKRFKQLERELAEQPWPPLPAGPLR

SEQ ID NO: 2140 - protein, 327 aa, Homo sapiens
  misc_feature (1)...(327): Xaa = any amino acid or nothing
SSAGSARKLQVMALAARLWRLLPFRRGAAPGSRLPAGTSGSRGHCGPCRFRGFEVMGNPGTFKRGLLLSALSYLGFETYQVISQAAVVHATAKVEEILEQADYLYESGETEKLYQLLTQYKESEDAELLWRLARASRDVAQLSRTSEEEKKLLVYEALEYAKRALEKNESSFASHKWYAICLSDVGDYEGIKAKIANAYIIKEHFEKAIELNPKDATSIHLMGIWCYTFAEMPWYQRRIAXNACLQLPPXFPPYEKALGYFHRAEQVDPNFYSKNLLLLGKTYLKLHNKKLAAFWLMKAKDYPAHTEEDKQIQTEAAQLLTSFSEKN

SEQ ID NO: 2141 - protein, 484 aa, Homo sapiens
  misc_feature (1)...(484): Xaa = any amino acid or nothing
IALLIVDGLAWDDQGGLALLHISPSKLILXQDSSGMSYVMVRCTITRAFFKSLLCHICQYSIGPQXVTCPGQDACKEXKSTANXGGXREXXPQVLFFAFLSNPAVKFGRMSKKQRDSLYAEVQKHQQRLQEQRQQQSGEAEALARVYSSSISNGLSNLNNETSGTYANGSVIDLPKSEGYYNVVSGQPSPDQSGLDMTGIKQIKQEPIYDLTSVPNLFTYSSFNNGQLAPGITMTEIDRIAQNIIKSHLETCQYTMEELHQLAWQTHTYEEIKAYQSKSREALWQQCAIQITHAIQYVVEFAKRITGFMELCQNDQILLLKSGCLEVVLVRMCRAFNPLNNTVLFEGKYGGMQMFKALGSDDLVNEAFDFAKNLCSLQLTEEEIALFSSAVLISPDRAWLIEPRKVQKLQEKIYFALQHVIQKNHLDDETLAKLIAKIPTITAVCNLHGEKLQVFKQSHPEIVNTLFPPLYKELFNPDCATACK

SEQ ID NO: 2142 - protein, 230 aa, Homo sapiens
  misc_feature (1)...(230): Xaa = any amino acid or nothing
SRGTFRCFCRDFFPCFSNMRLFLWNAVLTLFVTSLIGALIPEPEVKIEVLQKPFICHRKTKGGDLMLVHYEGYLEKDGSLFHSTHKHNNGQPIWFTLGILEALKGWGPGAXKDMCVGEKRKLIIPPALGYGKEGKGKIPPESTLIFNIDLLEIRNGPRSHESFQEMDLNDDWKLSKDEVKAYLKKEFEKHGAVVNESHHDALVEDIFDKEDEDKDGFISAREFTYKHDEL

SEQ ID NO: 2143 - protein, 1011 aa, Homo sapiens
  misc_feature (1)...(1011): Xaa = any amino acid or nothing
PRLKRLVVTEEDGGARPEALGKIAPRTPAELGARADQELVTALMCDLRRPAAGGMMDLAYVCEWEKWSKSTHCPSVPLACAWSCRNLIAFTMDLRSDDQDLTRMIHILDTEHPWDLHSIPSEHHEAITCLEWDQSGFPGFLFSRWPTGQIKCWSMGVSTLANSWESSVGSLVEGGPHLWALSWLHNGVKLALHVEKSGASSFGEKFSRVKFSPSLTLFGGNAMEGWIAVTVSGLVTVSLLQPSGQVLTSTESLCRLRARVALADIAFTGGGNIVVATADGSSASPVQFYKVCVSVVSEKCRIDTDILPSLFMRCTTDLNRKDKFPAITHLKFLARDMSEQVLLCASSQTSSIVECWSLRKEGLPVNNIFQQISPVVGDKQPTILKWRILSATNDLDRVSAVALPKLPISLTNTDLKVASDTQFYPGLGLALAFHDGSVHIVHRLSLQTMAVFYSSAAPRPVDEPAMKRPRTAGPAVHLKAMQLSWTSLALVGIDSHGKLSVLRLSPSMGHPLEVGLALRHLLFLLEYCMVTGYDWWDILLHVQPSMVQSLVEKLHEEYTRQTAALQQVLSTRILAMKASLCKLSPCTVTRVCDYHTKLFLIAISSTLKSLLRPHFLNTPDKSPGDRLTEICTKITDVDIDKVMINLKTEEFVLDMNTLQALQQLLQWVGDFVLYLLASLPNQPCPTSEPCPTSEPSPTSEPSPTSEPSSPXSLCGSLLRPGHSFLRDGTSLGMLRELMVVIRIWGLLKPSCLPVYTATSDTQDSMSLLFRLLTKLWICCRDEGPASEPDEALVDECCLLPSQLLIPSLDWLPASDGLVSRLQPKQPLRLQFGRAPTLPGSAATLQLDGLARAPGQPKIDHLRRLHLGACPTEECKACTRCGCVTMLKSPNRTTAVKQWEQRWIKNCLVRWALVAGAPQLPLSPAAPQLLLSYPSAAPEPGCCKSHRSPWTLLGAVNLSPPCRAVEGRGPDACVTSRASEEAPAFVQLGPQSTHHSPRTPRSLDHLHPEDRP

SEQ ID NO: 2144 - protein, 55 aa, Homo sapiens
  misc_feature (1)...(55): Xaa = any amino acid or nothing
NGDKADLENESCRAQVLMPVVPALWEAEGGGSIEPRDLRLQXAVITPLTPAWVTQ

SEQ ID NO: 2145 - protein, 211 aa, Homo sapiens
  misc_feature (1)...(211): Xaa = any amino acid or nothing
KLLWLPPHSEQKRSPLYHPQGPSGTTPSAPFSSHSPPPSLLQAPSIAAFLRTHGHISASGPLRMPFPHHXNAFLLVFPGQRSQLTSPSHYLCREVFPDHHHHLCRLSLESSPLFHHRVLFCVPKQNVNSTRAQIFCLFVHIVGCRCINTFPLHLFRLHLWLHFLQIPLCKKNKSVKLGKTVVGRGCQSAAGSDTRVRAAVGAPGLPVEPLV

SEQ ID NO: 2146 - protein, 289 aa, Homo sapiens
  misc_feature (1)...(289): Xaa = any amino acid or nothing
HSALLTHSSFCVFTLCQDFFTYSSMSEEVTYADLQFQNSSEMEKIPEIGKFGEKAPPAPSHVWRPAALFLTLLCLLLLIGLGVLASMFHVTLKIEMKKMNKLQNISEELQRNISLQLMSNMNISNKIRNLSTTLQTIATKLCRELYSKEQEHKCKPCPRRWIWHKDSCYFLSDDVQTWQESKMACAAQNASLLKINNKNALEFIKSQSRSYDYWLGLSPEEDSYSWYESGXYNQPSAWVIRNAPDLNNMYCGYINRLYVQYYHCTYKQRMICEKMANPVQLGSTYFREA

SEQ ID NO: 2147 - protein, 602 aa, Homo sapiens
  misc_feature (1)...(602): Xaa = any amino acid or nothing
PGSTHASARSQVPRSAGEAAPHSRRPPGLLPHAPRAASAQLEERMRDPHPGMTLQEGDCRGSQTVSLTMGTADSDEMAPEAPQHTHIDVHIHQESALAKLLLTCCSALRPRATQARGSSRLLVASWVMQIVLGILSAVLGGFFYIRDYTLLVTSGAAIWTGAVAVLAGAAAFIYEKRGGTYWALLRTLLALAAFSTAIAALKLWNEDFRYGYSYYNSACRISSSSDWNTPAPTQSPEEVRRLHLCTSFMDMLKALFRTLQAMLLGVWILLLLASLTPLWLSLRGECSQPKGXVPKKRDQKEMLEVSGIXPGSTHASARSQVPRSAGEAAPHSRRPPGLLPHAPRAASAQLEERMRDPHPGMTLQEGDCRGSQTVSLTMGTADSDEMAPEAPQHTHIDVHIHQESALAKLLLTCCSALRPRATQARGSSRLLVASWVMQIVLGILSAVLGGFFYIRDYTLLVTSGAAIWTGAVAVLAGAAAFIYEKRGGTYWALLRTLLALAAFSTAIAALKLWNEDFRYGYSYYNSACRISSSSDWNTPAPTQSPEEVRRLHLCTSFMDMLKALFRTLQAMLLGVWILLLLASLTPLWLYCWRMFPTKGVSP

SEQ ID NO: 2148 - protein, 458 aa, Homo sapiens
  misc_feature (1)...(458): Xaa = any amino acid or nothing
VPNYLPSVSSAIGGEVPQRYVWRFCIGLHSAPRFLVAFAYWNHYLSCTSPCSCYRPLCRLNFGLNVVENLALLVLTYVSSSEDFTWVPGXGRSGEVFPEGTGLPLPHSDLPTSWCGHSLQCGSQSSFPPAIHENAFIVFIASSLGHMLLTCILWRLTKKHTVSQEDGLSLAGAPRQPRRKSRTSVLRIRVMVRWELSSNGNPGRGVLGLGLGLGNKLRVVGQNLGLXHCVWVVWETGEXKRWRLQMGIEXGVASRRQXVRNSVRGLVCHNSSAPPMYMGFFSPTVFGGGVGGXLHVTFILHPPEVEAAGIPLLLGPSLPQRQGREHIVVILAAPACAPFHDRXWEPREIRPSPXELGLRGEPTLSYPASCRVIRQPIPXDRKSYSWKQRLFIINFISFFSALAVYFRHNMYCEAGVYTIFAILEYTVVLTNMAFHMTAWWDFGNKELLITSQPEEKRF

SEQ ID NO: 2149 - protein, 292 aa, Homo sapiens
FFFFQRINFIEHSGSVSLLALACDLGWCEDWSCCLVQGGGDLVDVVQTNHGEDEAGGDTDSVDEARCKESQQEAQENLREDLCLESFAKDKILQIIEGSEREHEETRTKQAALDGEPLGGGQLTAVHLHPSKEQQGQEGGERQRGARTHHWRGWEKGRRVRLRPPSGKLRADQPVRKLGGPTPSTELPGLQPHAPTPHTAPATPTYSPAPDTPNPPVRWKCPLPVEPRTRQLCRERTRKACPPKPRPPLGLPGDPTGPVTHHAPPVSPTGASGQERRAEPGAVSYAHASATK

SEQ ID NO: 2150 - protein, 219 aa, Homo sapiens
SAQRWAAVAGRWGCRLLALLLLVPGPGGASEITFELPDNAKQCFYEDIAQGTKCTLEFQVITGGHYDVDCRLEDPDGKVLYKEMKKQYDSFTFTASKNGTYKFCFSNEFSTFTHKTVYFDFQVGETHLCFLVRDRVSALTQMESACVSIHEALKSVIDYQTHFRLREAQGRSRAEDLNTRVAYWSVGEALILLVVSIGQVFLLKSFFSDKRTTTTRVGS

SEQ ID NO: 2151 - protein, 438 aa, Homo sapiens
TPCMECIKGEGLREPQNLSGSQREPQTEGSMDGWRRMPRWGLLLLLWGSCTFGLPTDTTTFKRIFLKRMPSIRESLKERGVDMARLGPEWSQPMKRLTLGNTTSSVILTNYMDTQYYGEIGIGTPPQTFKVVFDTGSSNVWVPSSKCSRLYTACVYHKLFDASDSSSYKHNGTELTLRYSTGTVSGFLSQDIITVGGITVTQMFGEVTEMPALPFMLAEFDGVVGMGFIEQAIGRVTPIFDNIISQGVLKEDVFSFYYNRDSENSQSLGGQIVLGGSDPQHYEGNFHYINLIKTGVWQIQMKGVSVGSSTLLCEDGCLALVDTGASYISGSTSSIEKLMEALGAKEKRLFDYVVKCNEGPTLPPTFLFLLGGKDTPLTSADYLFQESYSSKKLSTLAIHAMYIPPPTGPTLALGATFIRKFYTEFDRGNNPHGFALAR

SEQ ID NO: 2152 - protein, 2044 aa, Homo sapiens
MCLGRMGASSPRSPEPVGPPAPGLPFCCGGSLLAVVVLLALPVAWGQCNAPEWLPFARPTNLTDEFEFPIGTYLNYECRPGYSGRPFSIICLKNSVWTGAKDRCRRKSCRNPPDPVNGMVHVIKGIQFGSQIKYSCTKGYRLIGSSSATCIISGDTVIWDNETPICDRIPCGLPPTITNGDFISTNRENFHYGSVVTYRCNPGSGGRKVFELVGEPSIYCTSNDDQVGIWSGPAPQCIIPNKCTPPNVENGILVSDNRSLFSLNEVVEFRCQPGFVMKGPRRVKCQALNKWEPELPSCSRVCQPPPDVLHAERTQRDKDNFSPGQEVFYSCEPGYDLRGAASMRCTPQGDWSPAAPTCEVKSCDDFMGQLLNGRVLFPVNLQLGAKVDFVCDEGFQLKGSSASYCVLAGMESLWNSSVPVCEQIFCPSPPVIPNGRHTGKPLEVFPFGKAVNYTCDPHPDRGTSFDLIGESTIRCTSDPQGNGVWSSPAPRCGILGHCQAPDHFLFAKLKTQTNASDFPIGTSLKYECRPEYYGRPFSITCLDNLVWSSPKDVCKRKSCKTPPDPVNGMVHVITDIQVGSRINYSCTTGHRLIGHSSAECILSGNAAHWSTKPPICQRIPCGLPPTIANGDFISTNRENFHYGSVVTYRCNPGSGGRKVFELVGEPSIYCTSNDDQVGIWSGPAPQCIIPNKCTPPNVENGILVSDNRSLFSLNEVVEFRCQPGFVMKGPRRVKCQALNKWEPELPSCSRVCQPPPDVLHAERTQRDKDNFSPGQEVFYSCEPGYDLRGAASMRCTPQGDWSPAAPTCEVKSCDDFMGQLLNGRVLFPVNLQLGAKVDFVCDEGFQLKGSSASYCVLAGMESLWNSSVPVCEQIFCPSPPVIPNGRHTGKPLEVFPFGKAVNYTCDPHPDRGTSFDLIGESTIRCTSDPQGNGVWSSPAPRCGILGHCQAPDHFLFAKLKTQTNASDFPIGTSLKYECRPEYYGRPFSITCLDNLVWSSPKDVCKRKSCKTPPDPVNGMVHVITDIQVGSRINYSCTTGHRLIGHSSAECILSGNTAHWSTKPPICQRIPCGLPPTIANGDFISTNRENFHYGSVVTYRCNLGSRGRKVFELVGEPSIYCTSNDDQVGIWSGPAPQCIIPNKCTPPNVENGILVSDNRSLFSLNEVVEFRCQPGFVMKGPRRVKCQALNKWEPELPSCSRVCQPPPEILHGEHTPSHQDNFSPGQEVFYSCEPGYDLRGAASLHCTPQGDWSPEAPRCAVKSCDDFLGQLPHGRVLFPLNLQLGAKVSFVCDEGFRLKGSSVSHCVLVGMRSLWNNSVPVCEHIFCPNPPAILNGRHTGTPSGDIPYGKEISYTCDPHPDRGMTFNLIGESTIRCTSDPHGNGVWSSPAPRCELSVRAGHCKTPEQFPFASPTIPINDFEFPVGTSLNYECRPGYFGKMFSISCLENLVWSSVEDNCRRKSCGPPPEPFNGMVHINTDTQFGSTVNYSCNEGFRLIGSPSTTCLVSGNNVTWDKKAPICEIISCEPPPTISNGDFYSNNRTSFHNGTVVTYQCHTGPDGEQLFELVGERSIYCTSKDDQVGVWSSPPPRCISTNKCTAPEVENAIRVPGNRSFFSLTEIIRFRCQPGFVMVGSHTVQCQTNGRWGPKLPHCSRVCQPPPEILHGEHTLSHQDNFSPGQEVFYSCEPSYDLRGAASLHCTPQGDWSPEAPRCTVKSCDDFLGQLPHGRVLLPLNLQLGAKVSFVCDEGFRLKGRSASHCVLAGMKALWNSSVPVCEQIFCPNPPAILNGRHTGTPLGDIPYGKEVSYTCDPHPDRGMTFNLIGESTIRRTSEPHGNGVWSSPAPRCELPVGAACPHPPKIQNGHYIGGHVSLYLPGMTISYTCDPGYLLVGKGFIFCTDQGIWSQLDHYCKEVNCSFPLFMNGISKELEMKKVYHYGDYVTLKCEDGYTLEGSPWSQCQADDRWDPPLAKCTSRTHDALIVGTLSGTIFFILLIIFLSWIILKHRKGNNAHENPKEVAIHLHSQGGSSVHPRTLQTNEENSRVLP

SEQ ID NO: 2153 - protein, 1075 aa, Homo sapiens
HGRSARLAAVPAEAMPGPRRPAGSRLRLLLLLLLPPLLLLLRGSHAGNLTVAVVLPLANTSYPWSWARVGPAVELALAQVKARPDLLPGWTVRTVLGSSENALGVCSDTAAPLAAVDLKWEHNPAVFLGPGCVYAAAPVGRFTAHWRVPLLTAGAPALGFGVKDEYALTTRAGPSYAKLGDFVAALHRRLGWERQALMLYAYRPGDEEHCFFLVEGLFMRVRDRLNITVDHLEFAEDDLSHYTRLLRTMPRKGRVIYICSSPDAFRTLMLLALEAGLCGEDYVFFHLDIFGQSLQGGQGPAPRRPWERGDGQDVSARQAFQAAKIITYKDPDNPEYLEFLKQLKHLAYEQFNFTMEDGLVNTIPASFHDGLLLYIQAVTETLAHGGTVTDGENITQRMWNRSFQGVTGYLKIDSSGDRETDFSLWDMDPENGAFRVVLNYNGTSQELVAVSGRKLNWPLGYPPPDIPKCGFDNEDPACNQDHLSTLEVLALVGSLSLLGILIVSFFIYRKMQLEKELASELWRVRWEDVEPSSLERHLRSAGSRLTLSGRGSNYGSLLTTEGQFQVFAKTAYYKGNLVAVKRVNRKRIELTRKVLFELKHMRDVQNEHLTRFVGACTDPPNICILTEYCPRGSLQDILENESITLDWMFRYSLTNDIVKGMLFLHNGAICSHGNLKSSNCVVDGRFVLKITDYGLESFRDLDPEQGHTVYAKKLWTAPELLRMASPPVRGSQAGDVYSFGIILQEIALRSGVFHVEGLDLSPKEIIERVTRGEQPPFRPSLALQSHLEELGLLMQRCWAEDPQERPPFQQIRLTLRKFNRENSSNILDNLLSRMEQYANNLEELVEERTQAYLEEKRKAEALLYQILPHSVAEQLKRGETVQAEAFDSVTIYFSDIVGFTALSAESTPMQVVTLLNDLYTCFDAVIDNFDVYKVETIGDAYMVVSGLPVRNGRLHACEVARMALALLDAVRSFRIRHRPQEQLRLRIGIHTGPVCAGVVGLKMPRYCLFGDTVNTASRMESNGEALKIHLSSETKAVLEEFGGFELELRGDVEMKGKGKVRTYWLLGERGSSTRG

SEQ ID NO: 2154 - protein, 1277 aa, Homo sapiens
DAPGRPPVRLPTMELEDGVVYQEEPGGSGAVMSERVSGLAGSIYREFERLIVRYDEEVVKELIPLVVAVLENLDSVFAQDQEHQVELELLRDDNEQLITQYEREKALRKHAEEKFIEFEDSQEQEKKDLQTRVESLESQTRQLELKAKNYADQISILEEREAELKKEYNALHQRHTEMIHNYMEHLERTKLHQLSGSDQLESTAHSRIRKERPISLGIFPLPAGDGLLTPDAQKGGETPGSEQWKFQELSQPRSHTSLKDELSDVSQGGSKATTPASTANSDVATIPTDTPLKEENEGFVKVTDAPNKSEISKHIEVQVAQETRNVSTGSAENEEKSEVQAIIESTPELDMDKDLSGYKGSSTPTKGIENKAFDRNTESLFEELSSAGSGLIGDVDEGADLLGMGREVENLILENTQLLETKNALNIVKNDLIAKVDELTCEKDVLQGELEAVKQAKLKLEEKNRELEEELRKARAEAEDARQKAKDDDDSDIPTAQRKRFTRVEMARVLMERNQYKERLMELQEAVRWTEMIRASRENPAMQEKKRSSIWQFFSRLFSSSSNTTKKPEPPVNLKYNAPTSHVTPSVKKRSSTLSQLPGDKSKAFDFLSEETEASLASRREQKREQYRQVKAHVQKEDGRVQAFGWSLPQKYKQVTNGQGENKMKNLPVPVYLRPLDEKDTSMKLWCAVGVNLSGGKTRDGGSVVGASVFYKDVAGLDTEGSKQRSASQSSLDKLDQELKEQQKELKNQEELSSLVWICTSTHSATKVLIIDAVQPGNILDSFTVCNSHVLCIASVPGARETDYPAGEDLSESGQVDKASLCGSMTSNSSAETDSLLGGITVVGCSAEGVTGAATSPSTNGASPVMDKPPEMEAENSEVDENVPTAEEATEATEGNAGSAEDTVDISQTGVYTEHVFTDPLGVQIPEDLSPVYQSSNDSDAYKDQISVLPNEQDLVREEAQKMSSLLPTMWLGAQNGCLYVHSSVAQWRKCLHSIKLKDSILSIVHVKGIVLVALADGTLAIFHRGVDGQWDLSNYHLLDLGRPHHSIRCMTVVHDKVWCGYRNKIYVVQPKAMKIEKSFDAHPRKESQVRQLAWVGDGVWVSIRLDSTLRLYHAHTYQHLQDVDIEPYVSKMLGTGKLGFSFVRITALMVSCNRLWVGTGNGVIISIPLTETVILHQGRLLGLRANKTSGVPGNRPGSVIRVYGDENSDKVTPGTFIPYCSMAHAQLCFHGHRDAVKFFVAVPGQVISPQSSSSGTDLTGDKGRGHLHRSLVVRRP

SEQ ID NO: 2155 - protein, 710 aa, Homo sapiens
FGRLLWGTAFKSWKMKAPIPHLILLYATFTQSLKVVTKRGSADGCTDWSIDIKKYQVLVGEPVRIKCALFYGYIRTNYSLAQSAGLSLMWYKSSGPGDFEEPIAFDGSRMSKEEDSIWFRPTLLQDSGLYACVIRNSTYCMKVSISLTVGENDTGLCYNSKMKYFEKAELSKSKEISCRDIEDFLLPTREPEILWYKECRTKTWRPSIVFKRDTLLIREVREDDIGNYTCELKYGGFVVRRTTELTVTAPLTDKPPKLLYPMESKLTIQETQLGDSANLTCRAFFGYSGDVSPLIYWMKGEKFIEDLDENRVWESDIKILKEHLGEQEVSISLIVDSVEEGDLGNYSCYVENGNGRRHASVLLHKRELMYTVELAGGLGAILLLLVCLVTIYKCYKIEIMLFYRNHFGAEELDGDNKDYDAYLSYTKVDPDQWNQETGEEERFALEILPDMLEKHYGYKLFIPDRDLIPTGTYIEDVARCVDQSKRLIIVMTPNYVVRRGWSIFELETRLRNMLVTGEIKVILIECSELRGIMNYQEVEALKHTIKLLTVIKWHGPKCNKLNSKFWKRLQYEMPFKRIEPITHEQALDVSEQGPFGELQTVSAISMAAATSTALATAHPDLRSTFHNTYHSQMRQKHYYRSYEYDVPPTGTLPLTSIGNQHTYCNIPMTLINGQRPQTKSSREQNPDEAHTNSAILPLLPRETSISSVIW

SEQ ID NO: 2156 - protein, 525 aa, Homo sapiens
NSARGGVGVRGARAMATVQEKAAALNLSALHSPAHRPPGFSVAQKPFGATYVWSSIINTLQTQVEVKKRRHRLKRHNDCFVGSEAVDVIFSHLIQNKYFGDVDIPRAKVVRVCQALMDYKVFEAVPTKVFGKDKKPTFEDSSCSLYRFTTIPNQDSQLGKENKLYSPARYADALFKSSDIRSASLEDLWENLSLKPANSPHVNISTTLSPQVINEVWQEETIGRLLQLVDLPLLDSLLKQQEAVPKIPQPKRQSTMVNSSNYLDRGILKAYSDSQEDEWLSAAIDCLEYLPDQMVVEISRSFPEQPDRTDLVKELLFDAIGRYYSSREPLLNHLSDVHNGIAELLVNGKTEIALEATQLLLKLLDFQNREEFRRLLYFMAVAANPSEFKLQKESDNRMVVKRIFSKAIVDNKNLSKGKTDLLVLFLMDHQKDVFKIPGTLHKIVSVKLMAIQNGRDPNRDAGYIYCQRIDQRDYSNITEKTTIDELLYLLKTLDEDSKLSAKEKKKLLGQFYKCHPDIFIEHFGD

SEQ ID NO: 2157 - protein, 700 aa, Homo sapiens
FGIVGTFALETDELDSDRDPAIFSLCDFGAMRPQILLLLALLTLGLAAQHQDKVPCKMVKMLCPDRVDKKVSCQVLGLLQVPSVLPPDTETLDLSGNQLRSILASPLGFYTALRHLDLSTNEISFLQPGAFQALTHLEHLSLAHNRLAMATALSAGGLGPLPRVTSLDLSGNSLYSGLLERLLGEAPSLHTLSLAENSLTRLTRHTFRDMPALEQLDLHSNVLMDIEDGAFEGLPRLTHLNLSRNSLTCISDFSLQQLRVLDLSCNSIEAFQTASQPQAEFQLTWLDLRENKLLHFPDLAALPRLIYLNLSNNLIRLPTGPPQDSKGIHAPSEGWSALPLSAPSGNASGRPLSQLLNLDLSYNEIELIPDSFLEHLTSLCFLNLSRNCLRTFEARRLGSLPCLMLLDLSHNALETLELGARALGSLRTLLLQGNALRDLPPYTFANLASLQRLNLQGNRVSPCGGPDEPGPSGCVAFSGITSLRSLSLVDNEIELLRAGAFLHTPLTELDLSSNPGLEVATGALGGLEASLEVLALQGNGLMVLQVDLPCFICLKRLNLAENRLSHLPAWTQAVSLEVLDLRNNSFSLLPGSAMGGLETSLRRLYLQGNPLSCCGNGWLAAQLHQGRVDVDATQDLICRFSSQEEVSLSHVRPEDCEKGGLKNINLIIILTFILVSAILLTTLAACCCVRRQKFNQQYKA

SEQ ID NO: 2158 - protein, 564 aa, Homo sapiens
FKALSQYIYTNTHLEREAAFEVAILLRRMEEGARHRNNTEKKHPGGGESDASPEAGSGGGGVALKKEIGLVSACGIIVGNIIGSGIFVSPKGVLENAGSVGLALIVWIVTGFITVVGALCYAELGVNIPKSGGDYFYVKDIFGGLAGFLRLWIAVLVIYPTNQAVIALTFSNYVLQPLFPTCFPPESGLRLLAAICLLLLTWVNCSSVRWATRVQDIFTAGKLLALALIIIMGIVQICKGEYFWLEPKNAFENFQEPDIGLVALAFLQGSFAYGGWNFLNYVTEELVDPYKNLPRAIFISIPLVTFVYVFANVALYVTAMSPQELLASNAVAVTFGEKLLGVMAWIMPISVALSTFGGVNGSLFTSSRLFFAGAREGHLPSVLAMIHVKRCTPIPALLFTCISTLLMLVTSDMYTLINYVGFINYLFYGVTVAGQIVLRWKKPDIPRPIKINLLFPIIYLLFWAFLLVFSLWSEPVVCGIGLAIMLTGVPVYFLGVYWQHKPKCFSDFIELLTLVSQKMCVVVYPEVERGSGTEEANEDMEEQQQPMYQPTPTKDKDVAGQPQP

SEQ ID NO: 2159 - protein, 271 aa, Homo sapiens
QDSRKMLPSTSVNSLVQGNGVLNSRDAARHTAGAKRYKYLRRLFRFRQMDFEFAAWQMLYLFTSPQRVYRNFHYRKQTKDQWARDDPAFLVLLSIWLCVSTIGFGFVLDMGFFETIKLLLWVVLIDCVGVGLLIATLMWFISNKYLVKRQSRDYDVEWGYAFDVHLNAFYPLLVILHFIQLFFINHVILTDTFIGYLVGNTLWLVAVGYYIYVTFLGYSVGLLFFSALPFLKNTVILLYPFAPLILLYGLSLALGWNFTHTLCSFYKYRVK

SEQ ID NO: 2160 - protein, 221 aa, Homo sapiens
SPASGHCRLNGAAVAMFGCLVAGRLVQTAAQQVAEDKFVFDLPDYESINHVVVFMLGTIPFPEGMGGSVYFSYPDSNGMPVWQLLGFVTNGKPSAIFKISGLKSGEGSQHPFGAMNIVRTPSVAQIGISVELLDSMAQQTPVGNAAVSSVDSFTQFTQKMLDNFYNFASSFAVSQVPDDTQRPSEMFIPANVVLKWYENFQRRTSTEPSLLENIIWIKINF

SEQ ID NO: 2161 - protein, 1116 aa, Homo sapiens
LEGSLNTERAKYYLTITMPHFTVTKVEDPEEGAAASISQEPSLADIKARIQDSDEPDLSQNSITGEHSQLLDDGHKKARNAYLNNSNYEEGDEYFDKNLALFEEEMDTRPKVSSLLNRMANYTNLTQGAKEHEEAENITEGKKKPTKTPQMGTFMGVYLPCLQNIFGVILFLRLTWVVGTAGVLQAFAIVLICCCCTMLTAISMSAIATNGVVPAGGSYFMISRALGPEFGGAVGLCFYLGTTFAAAMYILGAIEIFLVYIVPRAAIFHSDDALKESAAMLNNMRVYGTAFLVLMVLVVFIGVRYVNKFASLFLACVIVSILAIYAGAIKSSFAPPHFPVCMLGNRTLSSRHIDVCSKTKEINNMTVPSKLWGFFCNSSQFFNATCDEYFVHNNVTSIQGIPGLASGIITENLWSNYLPKGEIIEKPSAKSSDVLGSLNHEYVLVDITTSFTLLVGIFFPSVTGIMAGSNRSGDLKDAQKSIPIGTILAILTTSFVYLSNVVLFGACIEGVVLRDKFGDAVKGNLVVGTLSWPSPWVIVIGSFFSTCGAGLQSLTGAPRLLQAIAKDNIIPFLRVFGHSKANGEPTWALLLTAAIAELGILIASLDLVAPILSMFFLMCYLFVNLACALQTLLRTPNWRPRFRYYHWALSFMGMSICLALMFISSWYYAIVAMVIAGMIYKYIEYQGAEKEWGDGIRGLSLSAARFALLRLEEGPPHTKNWRPQLLVLLKLDEDLHVKHPRLLTFASQLKAGKGLTIVGSVIVGNFLENYGEALAAEQTIKHLMEAEKVKGFCQLVVAAKLREGISHLIQSCGLGGMKHNTVVMGWPNGWRQSEDARAWKTFIGTVRVTTAAHLALLVAKNISFFPSNVEQFSEGNIDVWWIVHDGGMLMLLPFLLKQHKVWRKCSIRFFTVAQLEDNSIQMKKDLATFLYHLRIEAEVEVVEMHDSDISAYTYERTLMMEQRSQMLRHMRLSKTERDREAQLVKDRNSMLRLTSIGSDEDEETETYQEKVHMTWTKDKYMASRGQKAKSMEGFQDLLNMRPDQSNVRRMHTAVKLNEVIVNKSHEAKLVLLNMPGPPRNPEGDENYMEFLEVLTEGLERVLLVRGGGSEVITIYS

SEQ ID NO: 2162 - protein, 191 aa, Homo sapiens
AVCTMSEMAELSELYEESSDLQMDVMPGEGDLPQMEVGSGSRELSLRPSRSGAQQLEEEGPMEEEEAQPMAAPEGKRSLANGPNAGEQPGQVAGADFESEDEGEEFDDWEDDYDYPEEEQLSGAGYRVSAALEEADKMFLRTREPALDGGFQMHYEKTPFDQLAFIEELFSLMVVNRLTEELGCDEIIDRE

SEQ ID NO: 2163 - protein, 216 aa, Homo sapiens
AKMGAYKYIQELWRKKQSDVMRFLLRVRCWQYRQLSALHRAPRPTRPDKARRLGYKAKQGYVYIYIGFVFAVIYRIRVRRGGRKRPVPKGATYGKPVHHGVNQLKFARSLQSVAEERAGRHCGALRVLNSYWVGEDSTYKFFEVILIDPFHKAIRRNPDTQWITKPVHKHREMRGLTSAGRKSRGLGKGHKFHHTIGGSRRAAWRRRNTLQLHRYR

SEQ ID NO: 2164 - protein, 500 aa, Homo sapiens
KGTEMNKSRWQSRRRHGRRSHQQNPWFRLRDSEDRSDSRAAQPAHDSGHGDDESPSTSSGTAGTSSVPELPGFYFDPEKKRYFRLLPGHNNCNPLTKESIRQKEMESKRLRLLQEEDRRKKIARMGFNASSMLRKSQLGFLNVTNYCHLAHELRLSCMERKKVQIRSMDPSALASDRFNLILADTNSDRLFTVNDVTVGGSKYGIINLQSLKTPTLKVFMHENLYFTNRKVNSVCWASLNHLDSHILLCLMGLAETPGCATLLPASLFVNSHPAGIDRPGMLCSFRIPGAWSCAWSLNIQANNCFSTGLSRRVLLTNVVTGHRQSFGTNSDVLAQQFALMAPLLFNGCRSGEIFAIDLRCGNQGKGWKATRLFHDSAVTSVRILQDEQYLMASDMAGKIKLWDLRTTKCVRQYEGHVNEYAYLPLHVHEEEGILVAVGQDCYTRIWSLHDARLLRTIPSPYPASKADIPSVAFSSRLGGSRGAPGLLMAVGQDLYCYSYS

SEQ ID NO: 2165 - protein, 873 aa, Homo sapiens
NKNILEVPSARTTRIMGDHLDLLLGVVLMAGPVFGIPSCSFDGRIAFYRFCNLTQVPQVLNTTERLLLSFNYIRTVTASSFPFLEQLQLLELGSQYTPLTIDKEAFRNLPNLRILDLGSSKIYFLHPDAFQGLFHLFELRLYFCGLSDAVLKDGYFRNLKALTRLDLSKNQIRSLYLHPSFGKLNSLKSIDFSSNQIFLVCEHELEPLQGKTLSFFSLAANSLYSRVSVDWGKCMNPFRNMVLEILDVSGNGWTVDITGNFSNAISKSQAFSLILAHHIMGAGFGFHNIKDPDQNTFAGLARSSVRHLDLSHGFVFSLNSRVFETLKDLKVLNLAYNKINKIADEAFYGLDNLQVLNLSYNLLGELYSSNFYGLPKVAYIDLQKNHIAIIQDQTFKFLEKLQTLDLRDNALTTIHFIPSIPDIFLSGNKLVTLPKINLTANLIHLSENRLENLDILYFLLRVPHLQILILNQNRFSSCSGDQTPSENPSLEQLFLGENMLQLAWETELCWDVFEGLSHLQVLYLNHNYLNSLPPGVFSHLTALRGLSLNSNRLTVLSHNDLPANLEILDISRNQLLAPNPDVFVSLSVLDITHNKFICECELSTFINWLNHTNVTIAGPPADIYCVYPDSLSGVSLFSLSTEGCDEEEVLKSLKFSLFIVCTVTLTLFLMTILTVTKFRGFCFICYKTAQRLVFKDHPQGTEPDMYKYDAYLCFSSKDFTWVQNALLKHLDTQYSDQNRFNLCFEERDFVPGENRPANIQDAIWNSRKIVCLVSRHFLRDGWCLEAFSYAQGRCLSDLNSALIMVVVGSLSQYQLMKHQSIRGFVQKQQYLRWPEDLQDVGWFLHKLSQQILKKEKEKKKDNNIPLQTVATIS

SEQ ID NO: 2166 - protein, 1268 aa, Homo sapiens
RDRAGVRPAGKQHAAAAFYDVGGDRPWDSGNTQLPPRNPVKANAMFGAGDEDDTDFLSPSGGARLASLFGLDQAAAGHGNEFFQYTAPKQPKKGQGTAATGNQATPKTAPATMSTPTILVATAVHAYRYTNGQYVKQGKFGAAVLGNHTTREYRILLYISQQQPVTVARIHVNFELMVRPNNYSTFYDDQRQNWSIMFESEKAAVEFNKQVCIAKCNSTSSLDAVLSQDLIVADGPAVEVGDSLEVAYTGWLFQNHVLGQVFDSTANKDKLLRLKLGSGKVIKGWEDGMLGMKKGGKRLLIVPPACAVGSEGVIGWTQATDSILVFEVEVRRVKIAKDSGSDGHSVSSRDSAAPSPIPGADNLSADPVVSPPTSIPFKSGEPALRTKSNSLSEQLAINTSPDAVKAKLISRMAKMGQPMLPILPPQLDSNDSEIEDVNTLQGGGQPVVTPSVQPSLQPAHPALPQMTSQAPQPSVTGLQAPSAALMQVSSLDSHSAVSGNAQSFQPYAGMQAYAYPQASAVTSQLQPVRPLYPAPLSQPPHFQGSGDMASFLMTEARQHNTEIRMAVSKVADKMDHLMTKVEELQKHSAGNSMLIPSMSVTMETSMIMSNIQRIIQENERLKQEILEKSNRIEEQNDKISELIERNQRYVEQSNLMMEKRNNSLQTATENTQARVLHAEQEKAKVTEELAAATAQVSHLQLKMTAHQKKETELQMQLTESLKETDLLRGQLTKVQAKLSELQETSEQAQSKFKSEKQNRKQLELKVTSLEEELTDLRVEKESLEKNLSERKKKSAQERSQAEEEIDEIRKSYQEELDKLRQLLKKTRVSTDQAAAEQLSLVQAELQTQWEAKCEHLLASAKDEHLQQYQEVCAQRDAYQQKLVQLQEKSVCFACLALQAQITALTKQNEQHIKELEKNKSQMSGVEAAASDPSEKVKKIMNQVFQSLRREFELEESYNGRTILGTIMNTIKMVTLQLLNQQEQEKEESSSEEEEEKAEERPRRPSQEQSASASSGQPQAPLNRERPESPMVPSEQVVEEAVPLPPQALTTSQDGHRRKGDSEAEALSEIKDGSLPPELSCIPSHRVLGPPTSIPPEPLGPVSMDSECEESLAASPMAAKPDNPSGKVCVREVAPDGPLQESSTRLSLTSDPEEGDPLALGPESPGEPQPPQLKKDDVTSSTGPHKELSSTEAGSTVAGAALRPSHHSQRSSLSGDEEDELFKGATLKALRPKAQPEEEDEDEVSMKGRPPPTPLFGDDDDDDDIDWLG

SEQ ID NO: 2167 - protein, 337 aa, Homo sapiens
FFRSSSDNGSPIRQYEHSTPAHQGPVMGLEGKSARNSQLRIVLVGKTGAGKSATGNSILGRKVFHSGTAAKSITKKCEKRSSSWKETELVVVDTPGIFDTEVPNAETSKEIIRCILLTSPGPHALLLVVPLGRYTEEEHKATEKILKMFGERARSFMILIFTRKDDLGDTNLHDYLREAPEDIQDLMDIFGDRYCALNNKATGAEQEAQRAQLLGLIQRVVRENKEGCYTNRMYQRAEEEIQKQTQAMQELHRVELEREKARIREEYEEKIRKLEDKVEQEKRKKQMEKKLAEQEAHYAVRQQRARTEVESKDGILELIMTALQIASFILLRLFAED

SEQ ID NO: 2168 - protein, 509 aa, Homo sapiens
APSGSWTRVVLTLDPCSLRSRSPRSLLDPGMPGISARGLSHEGRKQLAVNLTRVLALYRSILDAYIIEFFTDNLWDTLPCSWQEALDGLKPPQLATMLLGMPGEGEVVRYRSVWPLTLLALKSTACALAFTRMPGFQTPSEFLENPSQSSRLTAPFRKHVRPKKQHEIRRLGELVKKLSDFTGLHPGCRRGLRPGHLSRFMALGLGLMVKSIEGDQRLVERAQRLDQELLQALEKEEKRNPQVVQTSPRHSPHHVVRWVDPTALCEELLLPLENPCQGRARLLLTGLHACGDLSVALLRHFSCCPEVVALASVGCCYMKLSDPGGYPLSQWVAGLPGYELPYRLREGACHALEEYAERLQKAGPGLRTHCYRAALETVIRRARPELRRPGVQGIPRVHELKIEEYVQRGLQRVGLDPQLPLNLAALQAHLAQENRVVAFFSLALLLAPLVETLILLDRLLYLQEQALSPGFHAELLPIFSPELSPRNLVLVATKMPLGQALSVLETEDS

SEQ ID NO: 2169 - protein, 872 aa, Homo sapiens
SGSGHCLAEAASMGPWGWKLRWTVALLLAAAGTAVGDRCERNEFQCQDGKCISYKWVCDGSAECQDGSDESQETCLSVTCKSGDFSCGGRVNRCIPQFWRCDGQVDCDNGSDEQGCPPKTCSQDEFRCHDGKCISRQFVCDSDRDCLDGSDEASCPVLTCGPASFQCNSSTCIPQLWACDNDPDCEDGSDEWPQRCRGLYVFQGDSSPCSAFEFHCLSGECIHSSWRCDGGPDCKDKSDEENCAVATCRPDEFQCSDGNCIHGSRQCDREYDCKDMSDEVGCVNVTLCEGPNKFKCHSGECITLDKVCNMARDCRDWSDEPIKECGTNECLDNNGGCSHVCNDLKIGYECLCPDGFQLVAQRRCEDIDECQDPDTCSQLCVNLEGGYKCQCEEGFQLDPHTKACKAVGSIAYLFFTNRHEVRKMTLDRSEYTSLIPNLRNVVALDTEVASNRIYWSDLSQRMICSTQLDRAHGVSSYDTVISRDIQAPDGLAVDWIHSNIYWTDSVLGTVSVADTKGVKRKTLFRENGSKPRAIVVDPVHGFMYWTDWGTPAKIKKGGLNGVDIYSLVTENIQWPNGITLDLLSGRLYWVDSKLHSISSIDVNGGNRKTILEDEKRLAHPFSLAVFEDKVFWTDIINEAIFSANRLTGSDVNLLAENLLSPEDMVLFHNLTQPRGVNWCERTTLSNGGCQYLCLPAPQINPHSPKFTCACPDGMLLARDMRSCLTEGEAAVATQETSTVRLKVSSTAVRTQHTTTRPVPDTSRLPGATPGLTTVEIVTMSHQALGDVAGRGNEKKPSSVRALSIVLPIVLLVFLCLGVFLLWKNWRLKNINSINFDNPVYQKTTEDEVHICHNQDGYSYPSRQMVSLEDDVA

SEQ ID NO: 2170 - protein, 1376 aa, Homo sapiens
ERGISSQIKGMKSGSGGGSPTSLWGLLFLSAALSLWPTSGEICGPGIDIRNDYQQLKRLENCTVIEGYLHILLISKAEDYRSYRFPKLTVITEYLLLFRVAGLESLGDLFPNLTVIRGWKLFYNYALVIFEMTNLKDIGLYNLRNITRGAIRIEKNADLCYLSTVDWSLILDAVSNNYIVGNKPPKECGDLCPGTMEEKPMCEKTTINNEYNYRCWTTNRCQKMCPSTCGKRACTENNECCHPECLGSCSAPDNDTACVACRHYYYAGVCVPACPPNTYRFEGWRCVDRDFCANILSAESSDSEGFVIHDGECMQECPSGFIRNGSQSMYCIPCEGPCPKVCEEEKKTKTIDSVTSAQMLQGCTIFKGNLLINIRRGNNIASELENFMGLIEVVTGYVKIRHSHALVSLSFLKNLRLILGEEQLEGNYSFYVLDNQNLQQLWDWDHRNLTIKAGKMYFAFNPKLCVSEIYRMEEVTGTKGRQSKGDINTRNNGERASCESDVLHFTSTTTSKNRIIITWHRYRPPDYRDLISFTVYYKEAPFKNVTEYDGQDACGSNSWNMVDVDLPPNKDVEPGILLHGLKPWTQYAVYVKAVTLTMVENDHIRGAKSEILYIRTNASVPSIPLDVLSASNSSSQLIVKWNPPSLPNGNLSYYIVRWQRQPQDGYLYRHNYCSKDKIPIRKYADGTIDIEEVTENPKTEVCGGEKGPCCACPKTEAEKQAEKEEAEYRKVFENFLHNSIFVPRPERKRRDVMQVANTTMSSRSRNTTAADTYNITDPEELETEYPFFESRVDNKERTVISNLRPFTLYRIDIHSCNHEAEKLGCSASNFVFARTMPAEGADDIPGPVTWEPRPENSIFLKWPEPENPNGLILMYEIKYGSQVEDQRECVSRQEYRKYGGAKLNRLNPGNYTARIQATSLSGNGSWTDPVFFYVQAKRYENFIHLIIALPVAVLLIVGGLVIMLYVFHRKRNNSRLGNGVLYASVNPEYFSAADVYVPDEWEVAREKITMSRELGQGSFGMVYEGVAKGVVKDEPETRVAIKTVNEAASMRERIEFLNEASVMKEFNCHHVVRLLGVVSQGQPTLVIMELMTRGDLKSYLRSLRPEMENNPVLAPPSLSKMIQMAGEIADGMAYLNANKFVHRDLAARNCMVAEDFTVKIGDFGMTRDIYETDYYRKGGKGLLPVRWMSPESLKDGVFTTYSDVWSFGVVLWEIATLAEQPYQGLSNEQVLRFVMEGGLLDKPDNCPDMLFELMRMCWQYNPKMRPSFLEIISSIKEEMEPGFREVSFYYSEENKLPEPEELDLEPENMESVPLDPSASSSSLPLPDRHSGHKAENGPGPGVLVLRASFDERQPYAHMNGGRKNERALPLPQSSTC

SEQ ID NO: 2171 - protein, 239 aa, Homo sapiens
GRVLFRGCGVGHKGQVLMGTFILAQDWLSESNHVFCVSSMLRLQKRLASSVLRCGKKKVWLDPNETNEIANANSRQQIRKLIKDGLIIRKPVTVHSRARCRKNTLARRKGRHMGIGKRKGTANARMPEKVTWMRRMRILRRLLRRYRESKRYRESKKIDRHMYHSLYLKVKGNVFKNKRILMEHIHKLKADKARKKLLADQAEARRSKTKEARKRREERLQAKKEEIIKTLSKEEETKK

SEQ ID NO: 2172 - protein, 244 aa, Homo sapiens
DFRPGLLLPRKKKMFGFHKPKMYRSIEGCCISGAKSSSSRFTDSKRYEKDFQSCFGLHETRSGDICNACVLLLKRWKKLPAGSKKNWNHVVDARAGPSLKTTLKPKKVKTLSGNRIKSTQISKLQKEFKRHNSDAHSTTSSASPAQSPLFTVNQFRWTGSDTGVGFPGSNRNHPVFSFLDLTYWKRQKICCGIIYKGRFGEVLIDTHLFKPCCSNKKAAAEKPEEQGPEPLPISTQEWVTEVFM

SEQ ID NO: 2173 - protein, 1352 aa, Homo sapiens
PYLATLQLDSSLLIPPKYQTPPAAAQGQATPGNAGPLAPNGSAAPPAGSAFNPTSNSSSTNPAASSSASGSSVPPVSSSASAPGISQISTTSSSGFSGSVGGQNPSTGGISADRTQGNIGCGGDTDPGQSSSQPSQDGQESNVPSVGSLADPDYLNTPQMNTPVTLNSAAPASNSGAGVLPSPATPRFSVPTPRTPRTPRTPRGGGTASGQGSVKYDSTDQGSPASTPSTTRPLNSVEPATMQPIPEAHSLYVTLILSDSVMNIFKDRNFDSCCICACNMNIKGADVGLYIPDSSNEDQYRCTCGFSAIMNRKLGYNSGLFLEDELDIFGKNSDIGQAAERRLMMCQSTFLPQVEGTKKPQEPPISLLLLLQNQHTQPFASLNFLDYISSNNRQTLPCVSWSYDRVQADNNDYWTECFNALEQGRQYVDNPTGGKVDEALVRSATVHSWPHSNVLDISMLSSQDVVRMLLSLQPFLQDAIQKKRTGRTWENIQHVQGPLTWQQFHKMAGRGTYGSEESPEPLPIPTLLVGYDKDFLTISPFSLPFWERLLLDPYGGHRDVAYIVVCPENEALLEGAKTFFRDLSAVYEMCRLGQHKPICKVLRDGIMRVGKTVAQKLTDELVSEWFNQPWSGEENDNHSRLKLYAQVCRHHLAPYLATLQLDSSLLIPPKYQTPPAAAQGQATPGNAGPLAPNGSAAPPAGSAFNPTSNSSSTNPAASSSASGSSVPPVSSSASAPGISQISTTSSSGFSGSVGGQNPSTGGISADRTQGNIGCGGDTDPGQSSSQPSQDGQESVTERERIGIPTEPDSADSHAHPPAVVIYMVDPFTYAAEEDSTSGNFWLLSLMRCYTEMLDNLPEHMRNSFILQIVPCQYMLQTMKDEQVFYIQYLKSMAFSVYCQCRRPLPTQIHIKSLTGFGPAASIEMTLKNPERPSPIQLYSPPFILAPIKDKQTELGETFGEASQKYNVLFVGYCLSHDQRWLLASCTDLHGELLETCVVNIALPNRSRRSKVSARKIGLQKLWEWCIGIVQMTSLPWRVVIGRLGRLGHGELKDWSILLGECSLQTISKKLKDVCRMCGISAADSPSILSACLVAMEPQGSFVVMPDAVTMGSVFGRSTALNMQSSQLNTPQDASCTHILVFPTSSTIQVAPANYPNEDGFSPNNDDMFVDLPFPDDMDNDIGILMTGNLHSSPNSSPVPSPGSPSGIGVGSHFQHSRSQGERLLSREAPEELKQQPLALGYFVSTAKAENLPQWFWSSCPQAQNQCPLFLKASLHHHISVAQTDELLPARNSQRVPHPLDSKTTSDVLRFVLEQYNALSWLTCNPATQDRTSCLPVHFVVLTQLYNAIMNIL

SEQ ID NO: 2174 - protein, 690 aa, Homo sapiens
VEEGLGRRRTPPGGRRGPVTPARPGPDSVRRRLLPPSSAAAFSSHRHNLLCSRRRGGGGGGGGGGGGTIKRPGITGPTAATSPSGEPGNAASAPLSLLSPFPGQTTYQHPGVAEPSAYGGRDVACASLVFGRLQHRGGDRKRGLLGRSSGDAASDQPFRCRSGSTAGRLVKQMDFTEAYADTCSTVGLAAREGNVKVLRKLLKKGRSVDVADNRGWMPIHEAAYHNSVECLQMLINADSSENYIKMKTFEGFCALHLAASQGHWKIVQILLEAGADPNATTLEETTPLFLAVENGQIDVLRLLLQHGANVNGSHSMCGWNSLHQASFQENAEIIKLLLRKGANKECQDDFGITPLFVAAQYGKLESLSILISSGANVNCQALDKATPLFIAAQEGHTKCVELLLSSGADPDLYCNEDSWQLPIHAAAQMGHTKILDLLIPLTNRACDTGLNKVSPVYSAVFGGHEDCLEILLRNGYSPDAQACLVFGFSSPVCMAFQKDCEFFGIVNILLKYGAQINELHLAYCLKYEKFSIFRYFLRKGCSLGPWNHIYEFVNHAIKAQAKYKEWLPHLLVAGFDPLILLCNSWIDSVSIDTLIFTLEFTNWKTLAPAVERMLSARASNAWILQQHIATVPSLTHLCRLEIRSSLKSERLRSDSYISQLPLPRSLHNYLLYEDVLRMYEVPELAAIQDG

SEQ ID NO: 2175 - protein, 325 aa, Homo sapiens
RIMGLFDRGVQMLLTTVGAFAAFSLMTIAVGTDYWLYSRGVCKTKSVSENETSKKNEEVMTHSGLWRTCCLEGNFKGLCKQIDHFPEDADYEADTAEYFLRAVRASSIFPILSVILLFMGGLCIAASEFYKTRHNIILSAGIFFVSAGLSNIIGIIVYISANAGDPSKSDSKKNSYSYGWSFYFGALSFIIAEMVGVLAVHMFIDRHKQLRATARATDYLQASAITRIPSYRYRYQRRSRSSSRSTEPSHSRDASPVGIKGFNTLPSTEISMYTLSRDPLKAATTPTATYNSDRDNSFLQVHNCIQKENKDSLHSNTANRRTTPV

SEQ ID NO: 2176 - protein, 1724 aa, Homo sapiens
SDDLRTGLFQDVQDAESLKLPGVYEVLFYNETEDCPGMMLWRYPEPRGLTLVRITPVPFNTTEDPDISTADLGDVLQDPCSLEYWDELQKVFVAFREFNLSESKVCELQLPDINLVNDQKKLVSSDLWRIVLNSSQNGADDQSSASESGSQSTCDPLVTPTALAACTRVDSCFTPWFVPSLCVSFQFAHLEFHLCHHLDQLGTAAPQYLQPFVSDRNMPSELEYMIVSFREPHMYLRQWNNGSVCQEIQFLAQADCKLLECRNVTMQSVVKPFSIFGQMAVSSDVVEKLLDCTVIVDSVFVNLGQHVVHSLNTAIQAWQQNKCPEVEELVFSHFVICNDTQETLRFGQVDTDENILLASLHSHQYSWRSHKSPQLLHICIEGWGNWRWSEPFSVDHAGTFIRTIQYRGRTASLIIKVQQLNGVQKQIIICGRQIICSYLSQSIELKVVQHYIGQDGQAVVREHFDCLTAKQKLPSYILENNELTELCVKAKGDEDWSRDVCLESKAPEYSIVIQVPSSNSSIIYVWCTVLTLEPNSQVQQRMIVFSPLFIMRSHLPDPIIIHLEKRSLGLSETQIIPGKGQEKPLQNIEPDLVHHLTFQAREEYDPSDCAVPISTSLIKQIATKVHPGGTVNQILDEFYGPEKSLQPIWPYNKKDSDRNEQLSQWDSPMRVKLSIWKPYVRTLLIELLPWALLINESKWDLWLFEGEKIVLQVPAGKIIIPPNFQEAFQIGIYWANTNTVHKSVAIKLVHNLTSPKWKDGGNGEVVTLDEEAFVDTEIRLGAFPGHQKLCQFCISSMVQQGIQIIQIEDKTTIINNTPYQIFYKPQLSVCNPHSGKEYFRVPDSATFSICPGGEQPAMKSSSLPCWDLMPDISQSVLDASLLQKQIMLGFSPAPGADSSQCWSLPAIVRPEFPRQSVAVPLGNFRENGFCTRAIVLTYQEHLGVTYLTLSEDPSPRVIIHNRCPVKMLIKENIKDIPKFEVYCKKIPSECSIHHELYHQISSYPDCKTKDLLPSLLLRVEPLDEVTTEWSDAIDINSQGTQVVFLTGFGYVYVDVVHQCGTVFITVAPEGKAGPILTNTNRAPEKIVTFKMFITQLSLAVFDDLTHHKASAELLRLTLDNIFLCVAPGAGPLPGEEPVAALFELYCVEICCGDLQLDNQLYNKSNFHFAVLVCQGEKAEPIQCSKMQSLLISNKELEEYKEKCFIKLCITLNEGKSILCDINEFSFELKPARLYVEDTFVYYIKTLFDTYLPNSRLAGHSTHLSGGKQVLPMQVTQHARALVNPVKLRKLVIQPVNLLVSIHASLKLYIASDHTPLSFSVFERGPIFTTARQLVHALAMHYAAGALFRAGWVVGSLDILGSPASLVRSIGNGVADFFRLPYEGLTRGPGAFVSGVSRGTTSFVKHISKGTLTSITNLATSLARNMDRLSLDEEHYNRQEEWRRQLPESLGEGLRQGLSRLGISLLGAIAGIVDQPMQNFQKTSEAQASAGHKAKGVISGVGKGIMGVFTKPIGGAAELVSQTGYGILHGAGLSQLPKQRHQPSDVHADQAPNSHVKYVWKMLQSLGRPEVHMALDVVLVRGSGQEHEGCLLLTSEVLFVVSVSEDTQQQAFPVTEIDCAQDSKQNNLLTVQLKQPRVACDVEVDGVRERLSEQQYNRLVDYITKTSCHLAPSCSSMQIPCPVVAAEPPPSTVKTYHYLVDPHFAQVFLSKFTMVKNKALRKGFP

SEQ ID NO: 2177 - protein, 552 aa, Homo sapiens
FVGAPRRGNPFGSPGNPGRHQGPCHRPRGTKASGVSPTLWRPQAAATGLEMPSSGRALLDSPLDSGSLTSLDSSVFCSEGEGEPLALGDCFTVNVGGSRFVLSQQALSCFPHTRLGKLAVVVASYRRPGALAAVPSPLELCDDANPVDNEYFFDRSSQAFRYVLHYYRTGRLHVMEQLCALSFLQEIQYWGIDELSIDSCCRDRYFRRKELSETLDFKKDTEDQESQHESEQDFSQGPCPTVRQKLWNILEKPGSSTAARIFGVISIIFVGVSIINMALMSAELSWLDLQLLEILEYVCISWFTGEFVLRFLCVRDRCRFLRKVPNIIDLLAILPFYITLLVESLSGSQTTQELENVGAHCPGCLRLLRALRMLKAWGRHSTGLRSLGMTITQCYEEVGLLLLFLSVGISIFSTVEYFAEQSIPDTTFTSVPCAWWWATTSMTTVGYGDIRPDTTTGKIVAFMCILSGILVLALPIAIINDRFSACYFTLKLKEAAVRQREALKKLTKNIATDSYISVNLRDVYARSIMEMLRLKGRERASTRSSGGDDFWF

SEQ ID NO: 2178 - protein, 1435 aa, Homo sapiens
GTHPASSGPVPLPPAAVSAATREELGEPVPFVTASSGFQSMHSSNPKVRSSPSGNTQSSPKSKQEVMVRPPTVMSPSGNPQLDSKFSNQGKQGGSASQSQPSPCDSKSGGHTPKALPGPGGSMGLKNGAGNGAKGKGKRERSISADSFDQRDPGTPNDDSDIKECNSADHIKSQDSQHTPHSMTPSNATAPRSSTPPHGQTTATEPTPAQKTPAKVVYVFSTEMANKAAEAVLKGQVETIVSFHIQNISNNKTERSTAPLNTQISALRNDPKPLPQQPPAPANQDQNSSQNTRLQPTPPIPAPAPKPAAPPRPLDRESPGVENKLIPSVGSPASSTPLPPDGTGPNSTPNNRAVTPVSQGSNSSSADPKAPPPPPVSSGEPPTLGENPDGLSQEQLEHRERSLQTLRDIQRMLFPDEKEFTGAQSGGPQQNPGVLDGPQKKPEGPIQAMMAQSQSLGKGPGPRTDVGAPFGPQGHRDVPFSPDEMVPPSMNSQSGTIGPDHLDHMTPEQIAWLKLQQEFYEEKRRKPEQVVVQQCSLQDMMVHQHGPRGVVRGPPPPYQMTPSEGWAPGGTEPFSDGINMPHSLPPRGMAPHPNMPGSQMRLPGFAGMINSEMEGPNVPNPASRPGLSGVSWPDDVPKIPDGRNFPPGQGIFSGPGRGERFPNPQGLSEEMFQQQLAEKQLGLPPGMAMEGIRPSMEMNRMIPGSQRHMEPGNNPIFPRIPVEGPLSPSRGDFPKGIPPQMGPGRELEFGMVPSGMKGDVNLNVNMGSNSQMIPQKMREAGAGPEEMLKLRPGGSDMLPAQQKMVPLPFGEHPQQEYGMGPRPFLPMSQGPGSNSGLRNLREPIGPDQRTNSRLSHMPPLPLNPSSNPTSLNTAPPVQRGLGRKPLDISVAGSQVHSPGINPLKSPTMHQVQSPMLGSPSGNLKSPQTPSQLAGMLAGPAAAASIKSPPVLGSAAASPVHLKSPSLPAPSPGWTSSPEPPLQSPGIPPNHKAPLTMASPAMLGNVESGGPPPPTASQPASVNIPGSLPSSTPYTMPPEPTLSQNPLSIMMSRMSKFAMPSSNPGYNHDAIKTVASSDDDSPPARSPNLPSMNNMPGMGINTQNPRISGPNPVVPMPTLSPMGMTQPLSHSNQMPSPNAVGPNIPPHGVPMGPGLMSHNPIMGHGSQEPPMVPQGRMGFPQGFPPVQSPPQQVPFPHNGPSGGQGSFPGGMGFPGEGPLGRPSNLPQSSADAALCKPGGPGGPDSFTVLGNSMPSVFTDPDLQEVIRPGATGIPEFDLSRIIPSEKPSQTLQYFPRGEVPGRKQPQGPGPGFSHMQGMMGEQAPRMGLALPGMGGPGPVGTPDIPLGTAPSMPGHNPMRPPAFLQQGMMGPHHRMMSPAQSTMPGQPTLMSNPAAAVGMIPGKDRGPAGLYTHPGPVGSPGMMMSMQGMMGPNRTS

SEQ ID NO: 2179 - protein, 144 aa, Homo sapiens
ASFFNFSICICKIILEVGPPVGHPAHDDVGGRHGPGGRGSRSPRSLQCAPGGGRRSGCPAGSSPASTCPPSPGGSGADRFGPSPPPPSREAAPTAGAAASSTSSGASCPPVPASSRWGVRSRTRSGSGGEREPRDRPSERPRLV

SEQ ID NO: 2180 - protein, 633 aa, Homo sapiens
LPERAFGPRTPRAPRRRRRRLLLSPPPRPPPPLDREPRAPGPWLCPSRAGTAQDPARIRERRGRVAGGAAGPAMELRARGWWLLCAAAALVACARGDPASKSRSCGEVRQIYGAKGFSSSDVPQAEISGEHLRICPQGYTCCTSEMEENLANRSHAELETALRDSSRVLQAMLATQLRSFDDHFQHLLNDSERTLQATFPGAFGELYTQNARAFRDLYSELRLYYRGANLHLEETLAEFWARLLERLFKQLHPQLLLPDDYLDCLGKQAEALRPFGEAPRELRLRATRAFVAARSFVQGLGVASDVVRKVAQVPLGPECSRAVIEAGSYCALHCVGVPGARPCPDYCRNVLKGCLANQADLDAEWRNLLDSMVLITDKFWGTSGVESVIGSVHTWLAEAINALQDNRDTLTAKVIQGCGNPKVNPQGPGPEEKRRRGKLAPRERPPSGTLEKLVSEAKAQLRDVQDFWISLPGTLCSEKMALSTASDDRCWNGMARGRYLPEVMGDGLANQINNPEVEVDITKPDMTIRQQIMQLKIMTNRLRSAYNGNDVDFQDASDDGSGSGSGDGCLDDLCGRKVSRKSSSSRTPLTHALPGLSEQEGQKTSAASCPQPPTFLLPLLLFLALTVARPRWR

SEQ ID NO: 2181 - protein, 506 aa, Homo sapiens
ASRHGMTPGALLMLLGALGPPLAPGVRGSEAEGRLREKLFSGYDSSVRPAREVGDRVRVSVGLILAQLISLNEKDEEMSTKVYLDLEWTDYRLSWDPAEHDGIDSLRITAESVWLPDVVLLNNNDGNFDVALDISVVVSSDGSVRWQPPGIYRSSCSIQVTYFPFDWQNCTMVFSSYSYDSSEVSLQTGLGPDGQGHQEIHIHEGTFIENGQWENIHKPSRLIQPPGDPRGGREGQRQEVIFYLIIRRKPLFYLVNVIAPCILITLLAIFVFYLPPDAGEKMGLSIFALLTLTVFLLLLADKVPETSLSVPIIIKYLMFTMVLVTFSVILSVVVLNLHHRSPHTHQMPLWVRQIFIHKLPLYLRLKRPKPERDLMPEPPHCSSPGSGWGRGTDEYFIRKPPSDFLFPKPNRFQPELSAPDLRRFIDGPNRAVALLPELREVVSSISYIARQLQEQEDHDALKEDWQFVAMVVDRLFLWTFIIFTSVGTLVIFLDATYHLPPPDPFP

SEQ ID NO: 2182 - protein, 335 aa, Homo sapiens
ETMAKNPPENCEDCHILNAEAFKSKKICKSLKICGLVFGILALTLIVLFWGSKHFWPEVPKKAYDMEHTFYSNGEKKKIYMEIDPVTRTEIFRSGNGTDETLEVHDFKNGYTGIYFVGLQKCFIKTQIKVIPEFSEPEEEIDENEEITTTFFEQSVIWVPAEKPIENRDFLKNSKILEICDNVTMYWINPTLISGTFAKQLHHNFAFIILVSELQDFEEEGEDLHFPANEKKGIEQNEQWVVPQVKVEKTRHARQASEEELPINDYTENGIEFDPMLDERGYCCIYCRRGNRYCRRVCEPLLGYYPYPYCYQGGRVICRVIMPCNWWVARMLGRV

SEQ ID NO: 2183 - protein, 161 aa, Homo sapiens
EAEGEQVCGAKCCGDAPHVENREEETARIGPGVMESKEERALNNLIVENVNQENDEKDEKEQVANKGEPLALPLNVSEYCVPRGNRRRFRVRQPILQYRWDIMHRLGEPQARMREENMERIGEEVRQLMEKLREKQLSHSLRAVSTDPPHHDHHDEFCLMP

SEQ ID NO: 2184 - protein, 673 aa, Homo sapiens
PNGVALLHLPGAAVIPNTNYMFQDALGGRSRGSREESPAPSRAPASASLWRRLVVVEAKMAAHAAAAAQAAAAQAAHAEAADSWYLALLGFAEHFRTSSPPKIRLCVHCLQAVFPFKPPQRIEARTHLQLGSVLYHHTKNSEQARSHLEKAWLISQQIPQFEDVKFEAASLLSELYCQENSVDAAKPLLRKAIQISQQTPYWHCRLLFQLAQLHTLEKDLVSACDLLGVGAEYARVVGSEYTRALFLLSKGMLLLMERKLQEVHPLLTLCGQIVENWQGNPIQKESLRVFFLVLQVTHYLDAGQVKSVKPCLKQLQQCIQTISTLHDDEILPSNPADLFHWLPKEHMCVLVYLVTVMHSMQAGYLEKAQKYTDKALMQLEKLKMLDCSPILSSFQVILLEHIIMCRLVTGHKATALQEISQVCQLCQQSPRLFSNHAAQLHTLLGLYCVSVNCMDNAEAQFTTALRLTNHQELWAFIVTNLASVYIREGNRHQEVVLYSLLERINPDHSFPVSSHCLRAAAFYVRGLFSFFQGRYNEAKRFLRETLKMSNAEDLNRLTACSLVLLGHIFYVLGNHRESNNMVVPAMQLASKIPDMSVQLWSSALLRDLNKACGNAMDAHEAAQMHQNFSQQLLQDHIEACSLPEHNLITWTDGPPPVQFQAQNGPNTSLASLL

SEQ ID NO: 2185 - protein, 311 aa, Homo sapiens
PTRRPILPLTSPKAISVPSPLQGKQHTLVKSCLSVSGIGGFLVSLSSRMKLQTLAVSVTALKFWSAYVPCQTQDRDALRLTLEQIDLIRRMCASYSELELVTSAKALNDTQKLACLIGVEGGHSLDNSLSILRTFYMLGVRYLTLTHTCNTPWAESSAKGVHSFYNNISGLTDFGEKVVAEMNRLGMMVDLSHVSDAVARRALEVSQAPVIFSHSAARGVCNSARNVPDDILQLLEEERWAFVMVSLFHGELIQWQPIRPMCSTVADHFDHIKAVIGSKFIGIGGDYDGAGKYRKKTTCKAPWRTSSRMSS

SEQ ID NO: 2186 - protein, 101 aa, Homo sapiens
PPRSRPSCWRKKVGPGRPWWWGGTGPPGQGRPEIRLLPLPMTGACGAVAASRTGSSGPGSSLPNGHGGKGSGLANGLAGNPGHLGLGSSFGTGPGSGRPPP

SEQ ID NO: 2187 - protein, 536 aa, Homo sapiens
VLRGQRGPAGGLAEERRRGRNEWRIHDVTTAPFPGLVQRRSRLLIVSQVRYFLKNKVSPDLCNEDGLTALHQCCIDNFEEIVKLLLSHGANVNAKDNELWTPLHAAATCGHINLVKILVQYGADLLAVNSDGNMPYDLCEDEPTLDVIETCMAYQGITQEKINEMRVAPEQQMIADIHCMIAAGQDLDWIDAQGATLLHIAGANGYLRAAELLLDHGVRVDVKDWDGWEPLHAAAFWGQMQMAELLVSHGANLNARTSMDEMPIDLCEEEEFKVLLLELKHKHDVIMKSQLRHKSSLSRRTSHRQASSVGKVVRRTQPVGTGPNLYRKEYEGEEAILWQRSAAEDQRTSTYNGDIRETRTDQENKDPNPRLEKPVLLSEFPTKIPRGELDMPVENGLRAPVSAYQYALANGDVWKVHEVPDYSMAYGNPGVADATPPWSSYKEQSPQTLLELKRQRAAAKLLSHPFLSTHLGSSMARTGESSSEGKAPLIGGRTSPYSSNGTSVYYTVTSGDPPLLKFKAPIEEMEEKVHGCCRIS

SEQ ID NO: 2188 - protein, 1849 aa, Homo sapiens
AGPLEPRVQGAMALQLWALTLLGLLGAGASLRPRKLDFFRSEKELNHLAVDEASGVVYLGAVNALYQLDAKLQLEQQVATGPVLDNKKCTPPIEASQCHEAEMTDNVNQLLLVDPPRKRLVECGQLLKGICALRALSNISLRLFYEDGSGEKSFVASNDEGVATVGLVSSTGPGGDRVLFVGKGNGPHDNGIIVSTRLLDRTDSREAFEAYTDHATYKAGYLSTNTQQFVAAFEDGPYVFFVFNQQDKHPARNRTLLARMCREDPNYYSYLEMDLQCRDPDIHAAAFGTCLAASVAAPGSGRVLYAVFSRDSRSSGGPGAGLCLFPLDEVHAKMEANRNACYTGTREARDIFYKPFHGDIQCGGHAPGSSKSFPCGSEHLPYPLGSRDGLRGTAVLQRGGLNLTAVTVAAENNHTVAFLGTSDGRILKVYLTPDGTSSEYDSILVEINKRVKRDLVLSGDLGSLYAMTQDKVFRLPVQECLSYPTCTQCRDSQDPYCGWCVVEGRCTRKAECPRAEEASHWLWSRSKSCVAVTSAQPQNMSRRAQGEVQLTVSPLPALSEEDELLCLFGESPPHPARVEGEAVICNSPSSIPVTPPGQDHVAVTIQLLLRRGNIFLTSYQYPFYDCRQAMSLEENLPCISCVSNRWTCQWDLRYHECREASPNPEDGIVRAHMEDSCPQFLGPSPLVIPMNHETDVNFQGKNLDTVKGSSLHVGSDLLKFMEPVTMQESGTFAFRTPKLSHDANETLPLHLYVKSYGKNIDSKLHVTLYDCSFGRSDCSLCRAANPDYRCAWCGGQSRCVYEALCNTTSECPPPVITRIQPETGPLGGGIRITILGSNLGVQAGDIQRISVAGRNCSFQPERYSVSTRIVCVIEAAETPFTGGVEVDVFGKLGRSPPNVQFTFQQPKPLSVEPQQGPQAGGTTLTIHGTHLDTGSQEDVRVTLNGVPCKVTKFGAQLQCVTGPQATRGQMLLEVSYGGSPVPNPGIFFTYRENPVLRAFEPLRSFASGGRSINVTGQGFSLIQRFAMVVIAEPLQSWQPPREAESLQPMTVVGTDYVFHNDTKVVFLSPAVPEEPEAYNLTVLIEMDGHRALLRTEAGAFEYVPDPTFENFTGGVKKQVNKLIRARGTNLNKAMTLQEAEAFVGAERCTMKTLTETDLYCEPPEVQPPPKRRQKRDTTHNLPEFIVKFGSREWVLGRVEYDTRVSDVPLSLILPLVIVPMVVVIAVSVYCYWRKSQQAEREYEKIKSQLEGLEESVRDRCKKEFTDLMIEMEDQTNDVHEAGIPVLDYKTYTDRVFFLPSKDGDKDVMITGKLDIPEPRRPVVEQALYQFSNLLNSKSFLINFIHTLENQPEFSARAKVYFASLLTVALHGKLEYYTDIMHTLFLELLEQYVVAKNPKLMLRRSETVVERMLSNWMSICLYQYLKDSAGEPLYKLFKAIKHQVEKGPVDAVQKKAKYTLNDTGLLGDDVEYAPLTVSVIVQDEGVDAIPVKVLNCDTISQVKEKIIDQVYRGQPCSCWPRPDSVVLEWRPGSTAQILSDLDLTSQREGRWKRVNTLMHYNVRDGATLILSKVGVSQQPEDSQQDLPGERHALLEEENRVWHLVRPTDEVDEGKSKRGSVKEKERTKAITEIYLTRLLSVKGTLQQFVDNFFQSVLAPGHAVPPAVKYFFDFLDEQAEKHNIQDEDTIHIWKTNSLPLRFWVNILKNPHFIFDVHVHEVVDASLSVIAQTFMDACTRTEHKLSRDSPSNKLLYAKEISTYKKMVEDYYKGIRQMVQVSDQDMNTHLAEISRAHTDSLNTLVALHQLYQYTQKYYDEIINALEEDPAAQKMQLAFRLQQIAAALENKVTDL

SEQ ID NO: 2189 - protein, 493 aa, Homo sapiens
RARRLALQCHVCVCALTPGEQSGRRLPGQTWLMFSCFCFSLQDNSFSSTTVTECDEDPVSLHEDQTDCSSLRDENNKENYPDAGALVEEHAPPSWEPQQQNVEATVLVDSVLRPSMGNFKSRKPKSIFKAESGRSHGESQETEHVVSSQSECQVRAGTPAHESPQNNAFKCQETVRLQPRIDQRTATSPKDAFETRQDLNEEEAAQVHGVKDPAPASTQSVLADGTDSADPSPVHKDGQNEADSAPEDLHSVGTSRLLLYHITDGDNPTAVRHGCSLFSGQSQRFNLDPESAPSPPSTQQFMMPRSSSRCSCGDGKEPQTITQLTKHIQSLKRKIRKFEEKFEQEKKYRPSHGDKTSNPEVLKWMNDLAKGRKQLKELKLKLSEEQGSAPKGPPRNLLCEQPTVPRENGKPEAAGPEPSSSGEETPDAALTCLKERREQLPPQEDSKVTKQDKNLIKPLYDRYRIIKQILSTPSLIPTIVSQDTCMLLLCTDV

SEQ ID NO: 2190 - protein, 683 aa, Homo sapiens
FFRFYFSFIRLFAMSLADLTKTNIDEHFFGVALENNRRSAACKRSPGTGDFSRNSNASNKSVDYSRSQCSCGSLSSQYDYSEDFLCDCSEKAINRNYLKQPVVKEKEKKKYNVSKISQSKGQKEISVEKKHTWNASLFNSQIHMIAQRRDAMAHRILSARLHKIKGLKNELADMHHKLEAILTENQFLKQLQLRHLKAIGKYENSQNNLPQIMAKHQNEVKNLRQLLRKSQEKERTLSRKLRETDSQLLKTKDILQALQKLSEDKNLAEREELTHKLSIITTKMDANDKKIQSLEKQLRLNCRAFSRQLAIETRKTLAAQTATKTLQVEVKHLQQKLKEKDRELEIKNIYSHRILKNLHDTEDYPKVSSTKSVQADRKILPFTSMRHQGTQKSDVPPLTTKGKKATGNIDHKEKSTEINHEIPHCVNKLPKQEDSKRKYEDLSGEEKHLEVQILLENTGRQKDKKEDQEKKNIFVKEEQELPPKIIEVIHPERESNQEDVLVREKFKRSMQRNGVDDTLGKGTAPYTKGPLRQRRHYSFTEATENLHHGLPASGGPANAGNMRYSHSTGKHLSNREEMELEHSDSGYEPSFGKSSRIKVKDTTFRDKKSSLMEELFGSGYVLKTDQSSPGVAKGSEEPLQSKESHPLPPSQASTSHAFGDSKVTVVNSIKPSSPTEGKRKIII

SEQ ID NO: 2191 - protein, 954 aa, Homo sapiens
SSRTREMEEKEILRRQIRLLQGLIDDYKTLHGNAPAPGTPAASGWQPPTYHSGRAFSARYPRPSRRGYSSHHGPSWRKKYSLVNRPPGPSDPPADHAVRPLHGARGGQPPVPQQHVLERQVQLSQGQNVVIKVKPPSKSGSASASGAQRGSLEEFEDTPWSDQRPREGEGEPPRGQLQPSRPTRARGTCSVEDPLLVCQKEPGKPRMVKSVGSVGDSPREPRRTVSESVIAVKASFPSSALPPRTGVALGRKLGSHSVASCAPQLLGDRRVDAGHTDQPVPSGSVGGPARPASGPRQAREASLVVTCRTNKFRKNNYKWVAASSKSPRVARRALSPRVAAENVCKASAGMANKVEKPQLIADPEPKPRKPATSSKPGSAPSKYKWKASSPSASSSSSFRWQSEAGSKDHASQLSPVLSRSPSGDRPALAHSGLKPLSGETPLSAYKVKTRTKIIRRRGSTSLPGDKKSGTSPAATAKSHLSLRRRQALRGKSSPVLKKTPNKGLVQVTKHRLCRLPPSRAHLPTKEASSLHAVRTAPTSKVIKTRYRIVKKTPASPLSAPPFPLSLPSWRARRLSLSRSLVLNRLRPVASGGGKAQPGSPWWRSKGYRCIGGVLYKVSANKLSKTSGQPSDAGSRPLLRTGRLDPAGSCSRSLASRAVQRSLAIIRQARQRREKRKEYCMYYNRFGRCNRGERCPYIHDPEKVAVCTRFVRGTCKKTDGTCPFSHHVSKEKMPVCSYFLKGICSNSNCPYSHVYVSRKAEVCSDFLKGYCPLGAKCKKKHTLLCPDFARRGACPRGAQCQLLHRTQKRHSRRAATSPAPGPSDATARSRVSASHGPRKPSASQRPTRQTPSSAALTAAAVAAPPHCPGGSASPSSSKASSSSSSSSSPPASLDHEAPSLQEAALAAACSNRLCKLPSFISLQSSPSPGAQPRVRAPRAPLTKDSGKPLHIKPRL

SEQ ID NO: 2192 - protein, 521 aa, Homo sapiens
WPDLVHTWSSEEAMGSCCSCPDKDTVPDNHRNKFKVINVDDDGNELGSGIMELTDTELILYTRKRDSVKWHYLCLRRYGYDSNLFSFESGRRCQTGQGIFAFKCARAEELFNMLQEIMQNNSINVVEEPVVERNNHQTELEVPRTPRTPTTPGFAAQNLPNGYPRYPSFGDASSHPSSRHPSVGSARLPSVGEESTHPLLVAEEQVHTYVNTTGVQEERKNRTSVHVPLEARVSNAESSTPKEEPSSIEDRDPQILLEPEGVKFVLGPTPVQKQLMEKEKLEQLGRDQVSGSGANNTEWDTGYDSDERRDAPSVNKLVYENINGLSIPSASGVRRGRLTSTSTSDTQNINNSAQRRTALLNYENLPSLPPVWEARKLSRDEDDNLGPKTPSLNGYHNNLDPMHNYVNTENVTVPASAHKIEYSRRRDCTPTVFNFDIRRPSLEHRQLNYIQVDLEGGSDSDNPQTPKTPTTPLPQTPTRRTELYAVIDIERTAAMSNLQKALPRDDGTSRKTRHNSTDLPL

SEQ ID NO: 2193 - protein, 221 aa, Homo sapiens
AGRPGTTHASGKMAYQSLRLEYLQIPPVSRAYTTACVLTTAAVQLELITPFQLYFNPELIFKHFQIWRLITNFLFFGPVGFNFLFNMIFLYRYCRMLEEGSFRGRTADFVFMFLFGGFLMTLFGLFVSLVFLGPGLYNNGSSMCGAEEPLCPHELLRPSQLPGPLSALGAHGIFLVVGELNHCGPFGYCSWTHIFFLGRCISQSTWWNKNSENTIYFESYF

SEQ ID NO: 2194 - protein, 128 aa, Homo sapiens
HRLCMPIQGACGERMEFSLLLPGLECNGVILAHCNLRLPGSSNSPASASQVAGITGVCHHARLIFVFSVETGFLHAGQAGLELLTSGDPPASASQSAGITGKSQHTRPGYEFIIPYSAAQEDALKALM

SEQ ID NO: 2195 - protein, 444 aa, Homo sapiens
LYPENLGESLFPILLLPPPWPDGGRPCCVEMSTRAKKLRRIWRILEEKESVAGAVQTLLLRSQEGGVTSAAASTLSEPPRRTQESRTRTRALGLPTLPMEKLAASTEPQGPRPVLGRESVQVPDDQDFRSFRSECEAEVGWNLTYSRAGVSVWVQAVEMDRTLHKIKCRMECCDVPAETLYDVLHDIEYRKKWDSNVIETFDIARLTVNADVGYYSWRCPKPLKNRDVITLRSWLPMGADYIIMNYSVKHPKYPPRKDLVRAVSIQTGYLIQSTGPKSCVITYLAQVDPKGSLPKWVVNKSSQFLAPKAMKKMYKACLKYPEWKQKHLPHFKPWLHPEQSPLPSLALSELSVQHADSLENIDESAVAESREERMGGAGGEGSDDDTSLYAEAPHRFRETETGPGAGRALGAAAAPALSPLHPPGTWWHRARPRRVLQPGWTEPQ

SEQ ID NO: 2196 - protein, 875 aa, Homo sapiens
RRKMAGCRGSLCCCCRWCCCCGERETRTPEELTILGETQEEEDEILPRKDYESLDYDRCINDPYLEVLETMDNKKGRRYEAVKWMVVFAIGVCTGLVGLFVDFFVRLFTQLKFGVVQTSVEECSQKGCLALSLLELLGFNLTFVFLESLLGLIEPVEAGSGITEGKCYLYARQVPGLVRLPTLLWKALGVLLTVAAMLLIGLGSPMIHSGSVVGAGLPQFQSISLRKIQFNFPYFRSDRYGKDKRDFVSAGAAAGVAAAFGAPIGGTLFSLEEGSSFWNQGLTWKVLFCSMSATFTLNFFRSGIQFGSWGSFQLPGLLNFGEFKCSDSDKKCHLWTAMDLGFFVVMGVIGGLLGATFNCLNKRLAKYRMRNVHPKPKLVRVLESLLVSLVTTVVVFVASMVLGECRQMSSSSQIGNDSFQLQVTEDVNSSIKTFFCPNDTYNDMATLFFNPQESAILQLFHQDGTFSPVTLALFFVLYFLLACWTYGISVPSGLFVPSLLCGAAFGRLVANVLKSYIGLGHIYSGTFALIGAAAFLGGVVRMTISLTVILIESTNEITYGLPIMVTLMVGKWTGDFFNKGIYDIHVGLRGVPLLEWETEVEMDKLRASDIMEPNLTYVYPHTRIQSLVSILRTTVHHAFPVVTENRGNEKEFMKGNQLISNNIKFKKSSILTRAGEQRKRSQSMKSYPSSELRNMCDEHIASEEPAEKEDLLQQMLERRYTPYPNLYPDQSPSEDWTMEERFRPLTFHGLILRSQLVTLLVRGVCYSESQSSASQPRLSYAEMAEDYPRYPDIHDLDLTLLNPRMIVDVTPYMNPSPFTVSPNTHVSQVFNLFRTMGLRHLPVVNAVGEIVGIITRHNLTYEFLQARLRQHYQTI

SEQ ID NO: 2197 - protein, 663 aa, Homo sapiens
NTNSSSVTNSAAGVEDLNIVQVTVPDNEKERLSSIEKIKQLREQVNDLFSRKFGEAIGVDFPVKVPYRKITFNPGCVVIDGMPPGVVFKAPGYLEISSMRRILEAAEFIKFTVIRPLPGLELSNGEYSTVGKRKIDQEGRVFQEKWERAYFFVEVQNISTCLICKRSMSVSKEYNLRRHYQTNHSKHYDQYMERMRDEKLHELKKGLRKYLLGLSDTECPEQKQVFANPSPTQKSPVQPVEDLAGNLWEKLREKIRSFVAYSIAIDEITDINNTTQLAIFIRGVDENFDVSEELLDTVPMTGTKSGNEIFSRVEKSLKNFCINWSKLVSVASTGTPPMVDANNGLVTKLKSRVATFCKGAELKSICCIIHPESLCAQKLKMDHVMDVVVKSVNWICSRGLNHSEFTTLLYELDSQYGSLLYYTEIKWLSRGLVLKRFFESLEEIDSFMSSRGKPLPQLSSIDWIRDLAFLVDMTMHLNALNISLQGHSQIVTQMYDLIRAFLAKLCLWETHLTRNNLAHFPTLKLVSRNESDGLNYIPKIAELKTEFQKRLSDFKLYESELTLFSSPFSTKIDSVHEELQMEVIDLQCNTVLKTKYDKVGIPEFYKYLWGSYPKYKHHCAKILSMFGSTYICEQLFSIMKLSKTKYCSQLKDSQWDSVLHIAT

SEQ ID NO: 2198 - protein, 95 aa, Homo sapiens
SVQYLPGRPTRTHASTDAPLMLKFTPLPSKTKASAPVQCLLLMAATFSPQGLAKPHSGTIPITCCFNAINTKIPIQRLESYTRITNIQCPKEAVM

SEQ ID NO: 2199 - protein, 318 aa, Homo sapiens
LDFLCHRDMGDNITSITEFLLLGFPVGPRIQMLLFGLFSLFYVFTLLGNGTILGLISLDSRLHAPMYFFLSHLAVVDIAYACNTVPRMLVNLLHPAKPISFAGRMMQTFLFSTFAVTECLLLVVMSYDLYVAICHPLRYLAIMTWRVCITLAVTSWTTGVLLSLIHLVLLLPLPFCRPQKIYHFFCEILAVLKLACADTHINENMVLAGAISGLVGPLSTIVVSYMCILCAILQIQSREVQRKAFCTCFSHLCVIGLFYGTAIIMYVGPRYGNPKEQKKYLLLFHSLFNPMLNPLICSLRNSEVKNTLKRVLGVERAL

SEQ ID NO: 2200 - protein, 337 aa, Homo sapiens
MGNDSVSYEYGDYSDLSDRPVDCLDGACLAIDPLRVAPLPLYAAIFLVGVPGNAMVAWVAGKVARRRVGATWLLHLAVADLLCCLSLPILAVPIARGGHWPYGAVGCRALPSIILLTMYASVLLLAALSADLCFLALGPAWCLRFSGACGVQVACGAAWTLALLLTVPSAIYRRLHQEHFPARLQCVVDYGGSSSTENAVTAIRFLFGFLGPLVAVASCHSALLCWAARRCRPLGTAIVVGFFVCWAPYHLLGLVLTVAAPNSALLARALRAEPLIVGLALAHSCLNPMLFLYFGRAQLRRSLPAACHWALRESQGQDESVDSKKSTSHDLVSEMEV

SEQ ID NO: 2201 - protein, 769 aa, Homo sapiens
AAASPLRMSRKGPRAEVCADCSAPDPGWASISRGVLVCDECCSVHRSLGRHISIVKHLRHSAWPPTLLQMVHTLASNGANSIWEHSLLDPAQVQSGPALKQTPKDKVHPIKSEFIRAKYQMLAFVHKLPCRDDDGVTAKDLSKQLHSSVRTGNLETCLRLLSLGAQANFFHPEKGTTPLHVAAKAGQTLQAELLVVYGADPGSPDVNGRTPIDYARQAGHHELAERLVECQYELTDRLAFYLCGRKPDHKNGHYIIPQMADSLDLSELAKAAKKKLQALSNRLFEELAMDVYDEVDRRENDAVWLATQNHSTLVTERSAVPFLPVNPEYSATRNQGRQKLARFNAREFATLIIDILSEAKRRQQGKSLSSPTDNLELSLRSQSDLDDQHDYDSVASDEDTDQEPLRSTGATRSNRARSMDSSDLSDGAVTLQEYLELKKALATSEAKVQQLMKVNSSLSDELRRLQREIHKLQAENLQLRQPPGPVPTPPLPSERAEHTPMAPGGSTHRRDRQAFSMYEPGSALKPFGGPPGDELTTRLQPFHSTELEDDAIYSVHVPAGLYRIRKGVSASAVPFTPSSPLLSCSQEGSRHTSKLSRHGSGADSDYENTQSGDPLLGLEGKRFLELGKEEDFHPELESLDGDLDPGLPSTEDVILKTEQVTKNIQELLRAAQEFKHDSFVPCSEKIHLAVTEMASLFPKRPALEPVRSSLRLLNASAYRLQSECRKTVPPEPGAPVDFQLLTQQVIQCAYDIAKAAKQLVTITTREKKQ

SEQ ID NO: 2202 - protein, 431 aa, Homo sapiens
RISKIQVYYSTGYSSRKMNPTLGLAIFLAVLLTVKGLLKPSFSPRNYKALSEVQGWKQRMAAKELARQNMDLGFKLLKKLAFYNPGRNIFLSPLSISTAFSMLCLGAQDSTLDEIKQGFNFRKMPEKDLHEGFHYIIHELTQKTQDLKLSIGNTLFIDQRLQPQRKFLEDAKNFYSAETILTNFQNLEMAQKQINDFIESKTHGKINNLIENIDPGTVMLLANYIFFRARWKHEFDPNVTKEEDFFLEKNSSVKVPMMFRSGIYQVGYDDKLSCTILEIPYQKNITAIFILPDEGKLKHLEKGLQVDTFSRWKTLLSRRVVDVSVPRLHMTGTFDLKKTLSYIGVSKIFEEHGDLTKIAPHRSLKVGEAVNKAELKMDERGTEGAAGTGAQTLPMETPLVVKIDKPYLLLIYSEKIPSVLFLGKIVNPIGK

SEQ ID NO: 2203 - protein, 1097 aa, Homo sapiens
MTHACNPSTLGGQGRRITRSHGRRRSSRGPVARHVAAGAGHENKHGGSRRFPAGVAPRRAMANVSKKVSWSGRDRDDEEAAPLLRRTARPGGGTPLLNGAGPGAARQSPRSALFRVGHMSSVELDDELLEPDMDPPHPFPKEIPHNEKLLSLKYESLDYDNSENQLFLEEERRINHTAFRTVEIKRWVICALIGILTGLVACFIDIVVENLAGLKYRVIKGSILPNIDKFTEKGGLSFSLLLWATLNAAFVLVGSVIVAFIEPVAAGSGIPQIKCFLNGVKIPHVVRLKTLVIKVSGVILSVVGGLAVGKEGPMIHSGSVIAAGISQGRSTSLKRDFKIFEYFRRDTEKRDFVSAGAAAGVSAAFGAPVGGVLFSLEEGASFWNQFLTWRIFFASMISTFTLNFVLSIYHGNMWDLSSPGLINFGRFDSEKMAYTIHEIPVFIAMGVVGGVLGAVFNALNYWLTMFRIRYIHRPCLQVIEAVLVAAVTATVAFVLIYSSRDCQPLQGGSMSYPLQLFCADGEYNSMAAAFFNTPEKSVVSLFHDPPGSYNPLTLGLFTLVYFFLACWTYGLTVSAGVFIPSLLIGAAWGRLFGISLSYLTGAAIWADPGKYALMGAAAQLGGIVRMTLSLTVIMMEATSNVTYGFPIMLVLMTAKIVGDVFIEGLYDMHIQLQSVPFLHWEAPVTSHSLTAREVMSTPVTCLRRREKVGVIVDVLSDTASNHNGFPVVEHADDTQPARLQGLILRSQLIVLLKHKVFVERSNLGLVQRRLRLKDFRDAYPRFPPIQSIHVSQDERECTMDLSEFMNPSPYTVPQEASLPRVFKLFRALGLRHLVVVDNRNQVVGLVTRKDLARYRLGKRGLEELSLAQTGPKAQATAEGRVAGAAQQPCQLRAVTLEDLGLLLAGGLASPEPLSLEELSERYESSHPTSTASVPEQDTAKHWNQLEQWVVELQAEVACLREHKQRCERATRSLLRELLQVRARVQLQGSELRQLQQEARPAAQAPEKEAPEFSGLQNQMQALDKRLVEVREALTRLRRRQVQQEAERRGAEQEAGLRLAKLTDLLQQEEQGREVACGALQKNQEDSSRRVDLEVARM

SEQ ID NO: 2204 - protein, 820 aa, Homo sapiens
AGTWEPRPYDQAKETGAPGSQPPVPPMELRPWLLWVVAATGTLVLLAADAQGQKVFTNTWAVRIPGGPAVANSVARKHGFLNLGQIFGDYYHFWHRGVTKRSLSPHRPRHSRLQREPQVQWLEQQVAKRRTKRDVYQEPTDPKFPQQWYLSGVTQRDLMVKAAWAQGYTGHGIVVSILDDGIEKNHPDLAGNYDPGASFDVNDQDPDPQPRYTQMNDNRHGTRCAGEVAAVANNGVCGVGVAYNARIGGVRMLDGEVTDAVEARSLGLNPNHIHIYSASWGPEDDGKTVDGPARLAEEAFFRGVSQGRGGLGSIFVWASGNGGREHDSCNCDGYTNSIYTLSISSATQFGNVPWYSEACSSTLATTYSSGNQNEKQIVTTDLRQKCTESHTGTSASAPLAAGIIALTLEANKNLTWRDMQHLVVQTSKPAHLNANDWATNGVGRKVSHSYGYGLLDAGAMVALAQNWTTVAPQRKCIIDILTEPKDIGKRLEVRKTVTACLGEPNHITRLEHAQARLTLSYNRRGDLAIHLVSPMGTRSTLLAARPHDYSADGFNDWAFMTTHSWDEDPSGEWVLEIENTSEANNYGTLTKFTLVLYGTAPEGLPVPPESSGCKTLTSSQACVVCEEGFSLHQKSCVQHCPPGFAPQVLDTHYSTENDVETIRASVCAPCHASCATCQGPALTDCLSCPSHASLDPVEQTCSRQSQSSRESPPQQQPPRLPPEVEAGQRLRAGLLPSHLPEVVAGLSCAFIVLVFVTVFLVLQLRSGFSFRGVKVYTMDRGLISYKGLPPEAWQEECPSDSEEDEGRGERTAFIKDQSAL

SEQ ID NO: 2205 - protein, 478 aa, Homo sapiens
QRPASQLLAPFAAEALPGAPRAAMAQHFSLAACDVVGFDLDHTLCRYNLPESAPLIYNSFAQFLVKEKGYDKELLNVTPEDWDFCCKGLALDLEDGNFLKLANNGTVLRASHGTKMMTPEVLAEAYGKKEWKHFLSDTGMACRSGKYYFYDNYFDLPGALLCARVVDYLTKLNNGQKTFDFWKDIVAAIQHNYKMSAFKENCGIYFPEIKRDPGRYLHSRPESVKKWLRQLKNAGKILLLITSSHSDYCRLLCAYILGNDFTDLFDIVITNALKPGFFSHLPSQRPFRTLENDEEQEALPSLDKPGWYSQGNAVHLYELLKKMTGKPEPKVVYFGDSMHSDIFPARHYSNWETVLILEELRGDEGTRSQRPEESEPLEKKGKYEGPKAKPLNTSSKKWGSFFIDSVLGLENTEDSLVYTWSCKRISTYSTIAIPSIEAIAELPLDYKFTRFSSSNSKTAGYYPNPPLVLSSDETLISK

SEQ ID NO: 2206 - protein, 413 aa, Homo sapiens
SSPSVFEFEHAVQPVFTMEFLKTCVLRRNACTAVCFWRSKVVQKPSVRRISTTSPRSTVMPAWVIDKYGKNEVLRFTQNMMMPIIHYPNEVIVKVHAASVNPIDVNMRSGYGATALNMKRDPLHVKIKGEEFPLTLGRDVSGVVMECGLDVKYFKPGDEVWAAVPPWKQGTLSEFVVVSGNEVSHKPKSLTHTQAASLPYVALTAWSAINKVGGLNDKNCTGKRVLILGASGGVGTFAIQVMKAWDAHVTAVCSQDASELVRKLGADDVIDYKSGSVEEQLKSLKPFDFILDNVGGSTETWAPDFLKKWSGATYVTLVTPFLLNMDRLGIADGMLQTGVTVGSKALKHFWKGVHYRWAFFMASGPCLDDIAELVDAGKIRPVIEQTFPFSKVPEAFLKVERGHARGKTVINVV

SEQ ID NO: 2207 - protein, 698 aa, Homo sapiens
LRRRKMTPQSLLQTTLFLLSLLFLVQGAHGRGHREDFRFCSQRNQTHRSSLHYKPTPDLRISIENSEEALTVHAPFPAAHPASRSFPDPRGLYHFCLYWNRHAGRLHLLYGKRDFLLSDKASSLLCFQHQEESLAQGPPLLATSVTSWWSPQNISLPSAASFTFSFHSPPHTGAHNASVDMCELKRDLQLLSQFLKHPQKASRRPSAAPASQQLQSLESKLTSVRFMGDMGSFEEDRINATVWKLQPTAGLQDLHIHSRQEEEQSEIMEYSVLLPRTLFQRTKGRSGEAEKRLLLVDFSSQALFQDKNSSQVLGEKVLGIVVQNTKVANLTEPVVLTFQHQLQPKNVTLQCVFWVEDPTLSSPGHWSSAGCETVRRETQTSCFCNHLTYFAVLMVSSVEVDAVHKHYLSLLSYVGCVVSALACLVTIAAYLCSRVPLPCRRKPRDYTIKVHMNLLLAVFLLDTSFLLSEPVALTGSEAGCRASAIFLHFSLLTCLSWMGLEGYNLYRLVVEVFGTYVPGYLLKLSAMGWGFPIFLVTLVALVDVDNYGPIILAVHRTPEGVIYPSMCWIRDSLVSYITNLGLFSLVFLFNMAMLATMVVQILRLRPHTQKWSHVLTLLCLSLVLGLPWALIFFSFASGTFQLVVLYLFSIITSFQGFLIFIWYWSMRLQARGGPSPLKSNSDSARLPISSGSTSSSRI

SEQ ID NO: 2208 - protein, 76 aa, Homo sapiens
  misc_feature (1)...(76): Xaa = any amino acid or nothing
DAGAVKSSDTNIWFRGMCDDKKGHRCPSXGQPQHFHVAFHTEAEGAMFYFRLHVIHRVMQSQQQLFPSTLFSWLLE

SEQ ID NO: 2209 - protein, 99 aa, Homo sapiens
  misc_feature (1)...(99): Xaa = any amino acid or nothing
FFFWRQSLALLPRLECSGATGAHCNLHFPGSSDCPTSASXIAGITGACYHAWLLFVFLAETGFHHVGQGGLELLTSSDPSGSASQSAGITGVSHCTWPI

SEQ ID NO: 2210 - protein, 189 aa, Homo sapiens
  misc_feature (1)...(189): Xaa = any amino acid or nothing
ALSTETRTPDMRRLLLVTSLVVVLLWEAGAVPAPKVPIKMQVKHWPSEQDPEKAWGARVVEPPEKDDQLVVLFPVQKPKLLTTEEKPRGQGRGPILPGTKAWMETEDTLGRVLSPEPDHDSLYHPPPEEDQGEERPRLWVMPNHQVLLGPEEDQDHIYHPQXGSRGHHCPRPVPRPRLLGLGPSLPCPS

SEQ ID NO: 2211 - protein, 72 aa, Homo sapiens
  misc_feature (1)...(72): Xaa = any amino acid or nothing
NYVCTIAFXEKKMGFXLSLSCLVLLFVLFLDCILTTTTRIMFHCTYLFASVCLSLLNTLLSPNCLKSAMILQ

SEQ ID NO: 2212 - protein, 60 aa, Homo sapiens
  misc_feature (1)...(60): Xaa = any amino acid or nothing
LKYYHITMGIYKTGKKVILXKSSMSNRFSVIFYKNIQKLSFSNYVYHQNYVFSSDWSYDF

SEQ ID NO: 2213 - protein, 116 aa, Homo sapiens
  misc_feature (1)...(116): Xaa = any amino acid or nothing
HGSSCALGDLAPGXLPSGPVLSSPAVRLXRKPLVWDSPSCLPATGPTXGLVLVLGGPDCTXWARGQHEHKRMRAPXSCRVTVNLAKKKKKTDQCIKPNYQSPPKECDYNILANSVA

SEQ ID NO: 2214 - protein, 258 aa, Homo sapiens
SDKGGKKADRKNHLRHAFPLLPHRVRERLHDPKVPVDADHVQGQDPGRAAHDIHGEDVTEKVSKDPLAPDEVGDTDEGHDRHGHREVGQRHGHDQEEVAYEERACEGGKFATVEVTDKPVDEALREAMPKVAKYAGGTNDKGIGMGMTVPISFAVFPNEDGSLQKKLKVWFRIPNQFQSDPPAPSDKSVKIEEREGITVYSMQFGGYAKEADYVAQATRLRAALEGTATYRGDIYFCTGYDPPMKPYGRRNEIWLLKT

SEQ ID NO: 2215 - protein, 41 aa, Homo sapiens
  misc_feature (1)...(41): Xaa = any amino acid or nothing
RRLGAVAHAYTSSTLGGRGGWITXGQELQTSLANMAKPRLY

SEQ ID NO: 2216 - protein, 223 aa, Homo sapiens
TCTYKYLMGWIRGRRSRHSWEMSEFHNYNLDLKKSDFSTRWQKQRCPVVKSKCRENASPFFFCCFIAVAMGIRFIIMVAIWSAVFLNSLFNQEVQIPLTESYCGPCPKNWICYKNNCYQFFDESKNWYESQASCMSQNASLLKVYSKEDQDLLKLVKSYHWMGLVHIPTNGSWQWEDGSILSPNLLTIIEMQKGDCALYASSFKGYIENCSTPNTYICMQRTV

SEQ ID NO: 2217 - protein, 82 aa, Homo sapiens
  misc_feature (1)...(82): Xaa = any amino acid or nothing
SIKIIEAFGSNGPDFWFFRYWSPXLFRQQVVFIMPFFQTLWLMNANRFCSIFTTTNVANNCWWTPYHCWLSVVVCRCESHGI

SEQ ID NO: 2218 - protein, 89 aa, Homo sapiens
  misc_feature (1)...(89): Xaa = any amino acid or nothing
PDTVIGGRGSGGKEFGRWVLWXVFEXRLGTPKGSCPAGGSRMVSESDXEGRGCXASYPCACXAGSXWRXGSRPAGRGTPPRSLSHARPP

SEQ ID NO: 2219 - protein, 297 aa, Homo sapiens
  misc_feature (1)...(297): Xaa = any amino acid or nothing
PRRDAEDRDESCLNPAFPIGLLHPNSVNSMARFLTLCTWLLLLGPGLLATVRAECSQDCATCSYRLVRPADINFLACVMECEGKLPSLKIWETCKELLQLSKPELPQDGTSTLRENSKPEESHLLAKRYGGFMKRYGGFMKKMDELYPMEPEEEANGSEILAKRYGGFMKKDAEEDDSLANSSDLLKELLETGDNRERSHHQDGSDNEEEVSKRYGGFMRGLKRSPQLKEKAKELQKRYGGFMRRVGPQKWXMTSPQNRYGGFLKRFAEALPSDEEGESYSKEVPEMEKRYGGFMRF

SEQ ID NO: 2220 - protein, 267 aa, Homo sapiens
  misc_feature (1)...(267): Xaa = any amino acid or nothing
EIHQRLTERTQFLDESRKNPNSXQANLLRGGGAGQGRGREGAESGGSRGEGPGSDGRLPATGDFWSPRSQRRGCCGRRAPRPEAMENGAVYSPTTEEDPGPARGPRSGLAAYFFMGRLPLLRRVLKGLQLLLSLLAFICEEVVSQCTLCGGLYFFEFVSCSAFLLSLLILIVYCTPFYERVDTTKVKSSDFYITLGTGCVFLLASIIFVSTHDRTSAEIAAIVFGFIASFMFLLDFITMLYEKRQESQLRKPENTTRAEALTEPLNA

SEQ ID NO: 2221 - protein, 129 aa, Homo sapiens
  misc_feature (1)...(129): Xaa = any amino acid or nothing
SCAMCSGLLXLLLPIWLSWTLGTRGSEPRSVNDPGNMSFVKETVDKLLTGFRCFREREAAPRRALRGAALPGESEAGDPESLRSSVNADWIQYSDLWEAEVSTPRCEAGFCQECFRTPGNQEKDGPFIC

SEQ ID NO: 2222 - protein, 234 aa, Homo sapiens
  misc_feature (1)...(234): Xaa = any amino acid or nothing
FVDIVSVVEFPHCPEARFPAQHGQDSKRLTLCPGGSXPQATLHLDRMRVSASPTKEIQVKKYKCGLIKPCPANYFAFKICSGAANVVGPTMCFEDRMIMSPVKNNVGRGLNIALVNGTTGAVLGQKAFDMYSGDVMHLVKFLKEIPGGALVLVASYDDPGTKMNDESRKLFSDLGSSYAKQLGFRDSWVFIGAKDLRGKSPFEQFLKEQPQTQNKYEGWPELLEMEGCMPPKPF

SEQ ID NO: 2223 - protein, 51 aa, Homo sapiens
  misc_feature (1)...(51): Xaa = any amino acid or nothing
ILKCAGHGGSCLXSQHFGRLRWEDRLRLGVQDHPGQHCETPSLLKIERKLF

SEQ ID NO: 2224 - protein, 249 aa, Homo sapiens
  misc_feature (1)...(249): Xaa = any amino acid or nothing
PCTSCVLWATLHLPASTRKAPQAECGMISITEWQKIGVGITGFGIFFILFGTLLYFDSVLLAFGNLLFLTGLSLIIGLRKTFWFFFQRHKLKGTSFLLGGVVIVLLRWPLLGMFLETYGFFSLFKGFFPVAFGFLGNVCNIPFLGALFRRLQGTSSMVXKTEMSSLNLDHWLKGAKREEWEPPPQSPALTHSPTYPGPPQVQKERNGAEQLTSNPQVDSRGCQEAEMQTPRRLGWGWYHTLTLYLWEEK

SEQ ID NO: 2225 - protein, 53 aa, Homo sapiens
  misc_feature (1)...(53): Xaa = any amino acid or nothing
GEKPVPTWLQDEAGQWLLGFVAQPWGWPGSERHEPXHGGVLFRLGPSAPPGKL

SEQ ID NO: 2226 - protein, 61 aa, Homo sapiens
  misc_feature (1)...(61): Xaa = any amino acid or nothing
YSCLCFLFKHITSFKNSVHIWLGTVVHAYNPNILGGQGGWIAXGQEFKTSLGNTVRPCLYK

SEQ ID NO: 2227 - protein, 312 aa, Homo sapiens
GCAPDTRFFVPEPGGRGAAPWVALVARGGCTFKDKVLVAARRNASAVVLYNEERYGNITLPMSHAGTGNIVVIMISYPKGREILELVQKGIPVTMTIGVGTRHVQEFISGQSVVFVAIAFITMMIISLAWLIFYYIQRFLYTGSQIGSQSHRKETKKVIGQLLLHTVKHGEKGIDVDAENCAVCIENFKVKDIIRILPCKHIFHRICIDPWLLDHRTCPMCKLDVIKALGYWGEPGDVQEMPAPESPPGRDPAANLSLALPDDDGSDESSPPSASPAESEPQCDPSFKGDAGENTALLEAGRSDSRHGGPIS

SEQ ID NO: 2228 - protein, 305 aa, Homo sapiens
ERSLLCKVDVRWIYVSEGTKTQRRHRQGSLRRGRMQAACWYVLFLLQPTVYLVTCANLTNGGKSELLKSGSSKSTLKHIWTESSKDLSISRLLSQTFRGKENDTDLDLRYDTPEPYSEQDLWDWLRNSTDLQEPRPRAKRRPIVKTGKFKKMFGWGDFHSNIKTVKLNLLITGKIVDHGNGTFSVYFRHNSTGQGNVSVSLVPPTKIVEFDLAQQTVIDAKDSKSFNCRIEYEKVDKATKNTLCNYDPSKTCYQEQTQSHVSWLCSKPFKVICIYISFYSTDYKLVQKVCPDYNYHSDTPYFPSG

SEQ ID NO: 2229 - protein, 29 aa, Homo sapiens
TESWKLKWWSPTCLDQLNGSAPGNVFIHG

SEQ ID NO: 2230 - protein, 188 aa, Homo sapiens
DAAVAMTAQGGLVANRGRRFKWAIELSGPGGGSRGRSDRGSGQGDSLYPVGYLDKQVPDTSVQETDRILVEKRCWDIALGPLKQIPMNLFIMYMAGNTISIFPTMMVCMMAWRPIQALMAISATFKMLESSSQKFLQGLVYLIGNLMGLALAVYKCQSMGLLPTHASDWLAFIEPPERMEFSGGGLLL

SEQ ID NO: 2231 - protein, 386 aa, Homo sapiens
SPQKTMRSHTITMTTTSVSSWPYSSHRMRFITNHSDQPPQNFSATPNVTTCPMDEKLLSTVLTTSYSVIFIVGLVGNIIALYVFLGIHRKRNSIQIYLLNVAIADLLLIFCLPFRIMYHINQNKWTLGVILCKVVGTLFYMNMYISIILLGFISLDRYIKINRSIQQRKAITTKQSIYVCCIVWMLALGGFLTMIILTLKKGGHNSTMCFHYRDKHNAKGEAIFNFILVVMFWLIFLLIILSYIKIGKNLLRISKRRSKFPNSGKYATTARNSFIVLIIFTICFVPYHAFRFIYISSQLNVSSCYWKEIVHKTNEIMLVLSSFNSCLDPVMYFLMSSNIRKIMCQLLFRRFQGEPSRSESTSEFKPGYSLHDTSVAVKIQSSSKST

SEQ ID NO: 2232 - protein, 104 aa, Homo sapiens
RQMALLKANKDLISAGLKEFSVLLNQQVFNDPLVSEEDMVTVVEDWMNFYINYYRQQVTGEPQERDKALQELRQELNTLANPFLAKYRDFLKSHELPSHPPPSS

SEQ ID NO: 2233 - protein, 61 aa, Homo sapiens
KVKTCRYNPKYSAANDTGFVDIPSREKDLAKAVATVGPISVAVGASHVFFQFYKKGKHLSS

SEQ ID NO: 2234 - protein, 73 aa, Homo sapiens
APVLILQMVKLSIVLTPQFLSHDQGQLTKELQQHVKSVTCPCEYLRKVSECRQMGPGALEQFPGLSCHTSHSG

SEQ ID NO: 2235 - protein, 84 aa, Homo sapiens
PSRGKMELEAMSRYTSPVNPAVFPHLTVVLLAIGMFFTAWFFVYEVTSTKYTRDIYKELLISLVASLFMGFGVLFLLLWVGIYV

SEQ ID NO: 2236 - protein, 169 aa, Homo sapiens
APENPFSRQHFNSETKVKLSLKTGTWLGNHAHLGEHFSTHHELGLSGKVVGFLVKNILEVIRNGGMETRHPGKVSSWFHRWDSRAEQHNHAEHHEDVPQGDEDSKVSEAQQEFPDVVTCAGLPGLLPKALRVLLFQLKVQHRPGIHQQRPEQQDVSDHRYGRSVRQNRK

SEQ ID NO: 2237 - protein, 77 aa, Homo sapiens
NPGCCLPVAMRTSYLLLFTLCLLLSEMASGGNFLTGLGHRSDHYNCVSSGGQCLYSACPIFTKIQGTCYRGKAKCCK

SEQ ID NO: 2238 - protein, 352 aa, Homo sapiens
APSHRRRYLSPSRSAGQLGNMALERLCSVLKVLLITVLVVEGIAVAQKTQDGQNIGIKHIPATQCGIWVRTSNGGHFASPNYPDSYPPNKECIYILEAAPRQRIELTFDEHYYIEPSFECRFDHLEVRDGPFGFSPLIDRYCGVKSPPLIRSTGRFMWIKFSSDEELEGLGFRAKYSFIPDPDFTYLGGILNPIPDCQFELSGADGIVRSSQVEQEEKTKPGQAVDCIWTIKATPKAKIYLRFLDYQMEHSNECKRNFVAVYDGSSSIENLKAKFCSTVANDVMLKTGIGVIRMWADEGSRLNRFRMLFTSFGGASPAQAALSFCHSNMCINNSLVCNGVQNCAYPWDENHC

SEQ ID NO: 2239 - protein, 908 aa, Homo sapiens
CHYIMNPSTHHPASAGGSILGLFDFFGLGLGEMTMDALLARLKLLNPDDLREEIVKAGLKCGPITSTTRFIFEKKLAQALLEQGGRLSSFYHHEAGVTALSQDPQRILKPAEGNPTDQAGFSEDRDFGYSVGLNPPEEEAVTSKTCSVPPSDTDTYRAGATASKEPPLYYGVCPVYEDVPARNERIYVYENKKEALQAVKMIKGSRFKAFSTREDAEKFARGICDYFPSPSKTSLPLSPVKTAPLFSNDRLKDGLCLSESETVNKERANSYKNPRTQDLTAKLRKAVEKGEEDTFSDLIWSNPRYLIGSGDNPTIVQEGCRYNVMHVAAKENQASICQLTLDVLENPDFMRLMYPDDDEAMLQKRIRYVVDLYLNTPDKMGYDTPLHFACKFGNADVVNVLSSHHLIVKNSRNKYDKTPEDVICERSKNKSVELKERIREYLKGHYYVPLLRAEETSSPVIGELWSPDQTAEASHVSRYGGSPRDPVLTLRAFAGPLSPAKAEDFRKLWKTPPREKAGFLHHVKKSDPERGFERVGRELAHELGYPWVEYWEFLGCFVDLSSQEGLQRLEEYLTQQEIGKKAQQETGEREASCRDKATTSGSNSISVRAFLDEDDMSLEEIKNRQNAARNNSPPTVGAFGHTRCSAFPLEQEADLIEAAEPGGPHSSRNGLCHPLNHSRTLAGKRPKAPRGEEAHLPPVSDLTVEFDKLNLQNIGRSVSKTPDESTKTKDQILTSRINAVERDLLEPSPADQLGNGHRRTESEMSARIAKMSLSPSSPRHEDQLEVTREPARRLFLFGEEPSKLDQDVLAALECADVDPHQFPAVHRWKSAVLCYSPSDRQSWPSPAVKGRFKSQLPDLSGPHSYSPGRNSVAGSNPAKPGLGSPGRYSPVHGSQLRRMARLAELAAL

SEQ ID NO: 2240 - protein, 30 aa, Homo sapiens
RHMPVIPALWEAEVGGLLEPRSSRSAWATE

SEQ ID NO: 2241 - protein, 371 aa, Homo sapiens
KLPWEPSFLIKMQIIRHSEQTLKTALISKNPVLVSQYEKLDAGEQRLMNEAFQPASDLFGPITLHSPSDWITSHPEAPQDFEQFFSDPYRKTPSPNKRSIYIQSIGSLGNTRIISEEYIKWLTGYCKAYFYGLRVKLLEPVPVSVTRCSFRVNENTHNLQIHAGDILKFLKKKKPEDAFCVVGITMIDLYPRDSWNFVFGQASLTDGVGIFSFARYGSDFYSMHYKGKVKKLKKTSSSDYSIFDNYYIPEITSVLLLRSCKTLTHEIGHIFGLRHCQWLACLMQGSNHLEEADRRPLNLCPICLHKLQCAVGFSIVERYKALVRWIDDESSDTPGATPEHSHEDNGNLPKPVEAFKEWKEWIIKCLAVLQK

SEQ ID NO: 2242 - protein, 549 aa, Homo sapiens
SAPTAPARPCRAERGSGGGMLALLAASVALAVAAGAQDSPAPGSRFVCTALPPEAVHAGCPLPAMPMQGGAQSPEEELRAAVLQLRETVVQQKETLASARAIRELTGKLARCEGLAGGKARGAGATGKDTMGDLPRDPGHVVEQLSRSLQTLKDRLESLEPLPAMPMQGGAQSPEEELRAAVLQLRETVVQQKETLASARAIRELTGKLARCEGLAGGKARGAGATGKDTMGDLPRDPGHVVEQLSRSLQTLKDRLESLEHQLRANVSNAGLPGDFREVLQQRLGELERQLLRKGAELEDEKSLLHNETSAHRQKTESTLNALLQRVTELERGNSAFKSPNAFKVSLPLRTNYLYGKIKKTLPELYAFTICLWLRSSASPGMGTPFSYAVPGQANEIVLIEWGNNPIELLINDKVAQLPLFVSDGKWHHICVTWTTRDGMWEAFQDGKKLGTGENLAPWHPIKPGGVLILGQEQDTVGGRFDATQAFVGELSQFNIWDRVLRAQEIVNIANCSTNMPGNIIPWVDNNVDVFGGASKWPVETCEERLLDL

SEQ ID NO: 2243 - protein, 378 aa, Homo sapiens
LTAGTAMNYPLTLEMDLENLEDLFWELDRLDNYNDTSLVENHLCPATEGPLMASFKAVFVPVAYSLIFLLGVIGNVLVLVILERHRQTRSSTETFLFHLAVADLLLVFILPFAVAEGSVGWVLGTFLCKTVIALHKVNFYCSSLLLACIAVDRYLAIVHAVHAYRHRRLLSIHITCGTIWLVGFLLALPEILFAKVSQGHHNNSLPRCTFSQENQAETHAWFTSRFLYHVAGFLLPMLVMGWCYVGVVHRLRQAQRRPQRQKAVRVAILVTSIFFLCWSPYHIVIFLDTLARLKAVDNTCKLNGSLPVAITMCEFLGLAHCCLNPMLYTFAGVKFRSDLSRLLTKLGCTGPASLCQLFPSWRRSSLSESENATSLTTF

SEQ ID NO: 2244 - protein, 127 aa, Homo sapiens
FVTRAGRWGAGARVRGGAGGMASGAARWLVLAPVRSGALRSGPSLRKDGDVSAAWSGSGRSLVPSRSVIVTRSGAILPKPVKMSFGLLRVFSIVIPFLYVGTLISKNFAALLEEHDIFVPEDDDDDD

SEQ ID NO: 2245 - protein, 53 aa, Homo sapiens
APYAHSQVHCLDKVCGLLPFLNPEVPDQFYRLWLSLFLHAGKEAPHCPRTRPL

SEQ ID NO: 2246 - protein, 124 aa, Homo sapiens
SPAWWNSQQRVVSPFLALLTLEPTFHHLLPIMQVSTAALAVLLCTMALCNQVLSAPLAADTPTACCFSYTSRQIPQNFIADYFETSSQCSKPSVIFLTKRGRQVCADPSEEWVQKYVSDLELSA

SEQ ID NO: 2247 - protein, 427 aa, Homo sapiens
RPRRRGTHHFSCVLGSFRVSAMFPRVSTFLPLRPLSRHPLSSGSPETSAAAIMLLTVRHGTVRYRSSALLARTKNNIQRYFGTNSVICSKKDKQSVRTEETSKETSESQDSEKENTKKDLLGIIKGMKVELSTVNVRTTKPPKRRPLKSLEATLGRLRRATEYAPKKRIEPLSPELVAAASAVADSLPFDKQTTKSELLSQLQQHEEESRAQRDAKRPKISFSNIISDMKVARSATARVRSRPELRIQFDEGYDNYPGQEKTDDLKKRKNIFTGKRLNIFDMMAVTKEAPETDTSPSLWDVEFAKQLATVNEQPLQNGFEELIQWTKEGKLWEFPINNEAGFDDDGSEFHEHIFLEKHLESFPKQGPIRHFMELVTCGLSKNPYLSVKQKVEHIEWFRNYFNEKKDILKESNIQFKLRPWKFLFRNN

SEQ ID NO: 2248 - protein, 137 aa, Homo sapiens
SCQTTQPPAQSCSTGTMRIMLLFTAILAFSLAQSFGAVCKEPQEEVVPGGGRSKRDPDLYQLLQRLFKSHSSLEGLLKALSQASTDPKESTSPEKRDMHDFFVGLMGKRSVQPDSPTDVNQENVPSFGILKYPPRAE

SEQ ID NO: 2249 - protein, 174 aa, Homo sapiens
PFHLGASSNTFRLQVQTQESKAQKEVKMGFIFSKSMNESMKNQKEFMLMNARLQLERQLIMQSEMRERQMAMQIAWSREFLKYFGTFFGLAAISLTAGAIKKKKPAFLVPIVPLSFILTYQYDLGYGTLLERMKGEAEDILETEKSKLQLPRGMITFESIEKARKEQSRFFIDK

SEQ ID NO: 2250 - protein, 388 aa, Homo sapiens
VWLPLKSYKIRSPSLHCQCEIFREEFLFSSLQEGRDKDTFSKMAMVSEFLKQAWFIENEEQEYVQTVKSSKGGPGSAVSPYPTFNPSSDVAALHKAIMVKGVDEATIIDILTKRNNAQRQQIKAAYLQETGKPLDETLKKALTGHLEEVVLALLKTPAQFDADELRAAMKGLGTDEDTLIEILASRTNKEIRDINRVYREELKRDLAKDITSDTSGDFRNALLSLAKGDRSEDFGVNEDLADSDARALYEAGERRKGTDVNVFNTILTTRSYPQLRRVFQKYTKYSKHDMNKVLDLELKGDIEKCLTAIVKCATSKPAFFAEKLHQAMKGVGTRHKALIRIMVSRSEIDMNDIKAFYQKMYGISLCQAILDETKGDYEKILVALCGGN

SEQ ID NO: 2251 - protein, 268 aa, Homo sapiens
VEFHPQRARAGARAPSMGVLLTQRTLLSLVLALLFPSMASMAAIGSCSKEYRVLLGQLQKQTDLMQDTSRLLDPYIRIQGLDVPKLREHCRERPGAFPSEETLRGLGRRCFLQTLNATLGCVLHRLADLEQRLPKAQDLERSGLNIEDLEKLQMARPNILGLRNNIYCMAQLLDNSDTAEPTKAGRGASQPPTPTPASDAFQRKLEGCRFLHGYHRFMHSVGRVFSKWGESPNRSRRHSPHQALRKGVRRTRPSRKGKRLMTRGQLPR

SEQ ID NO: 2252 - protein, 275 aa, Homo sapiens
TAARRRQKGTAARRLQKGTAARRRQKGTAARRRQKGTAARRPQKGTAARRRQKGTAARRRQKGTAARRRQKGTAARRPQKGTAARRRQKGTAARRRQKGTAARRRQKGLAIASRGCPCASRAGGVRGAGSRLRAMAPKVFRQYWDIPDGTDCHRKAYSTTSIASVAGLTAAAYRVTLNPPGTFLEGVAKVGQYTFTAAAVGAVFGLTTCISAHVREKPDDPLNYFLGGCAGGLTLGARTHNYGIGAAACVYFGIAASLVKMGRLEGWEVFAKPKV

SEQ ID NO: 2253 - protein, 194 aa, Homo sapiens
PWLPWSDGRAARSSRKCPRSRFPVQVGKMAVSTVFSTSSLMLALSRHSLLSPLLSVTSFRRFYRGDSPTDSQKDMIEIPLPPWQERTDESIETKRARLLYESRKRGMLENCILLSLFAKEHLQHMTEKQLNLYDRLINEPSNDWDIYYWATEAKPAPEIFENEVMALLRDFAKNKNKEQRLRAPDLEYLFEKPR

SEQ ID NO: 2254 - protein, 260 aa, Homo sapiens
GAGRALGHLETGAGDVAAALPARKFPRSLLGAGARLTGWTMNVFRILGDLSHLLAMILLLGKIWRSKCCKGISGKSQILFALVFTTRYLDLFTNFISIYNTVMKVVFLLCAYVTVYMIYGKFRKTFDSENDTFRLEFLLVPVIGLSFLENYSFTLLEILWTFSIYLESVAILPQLFMISKTGEAETITTHYLFFLGLYRALYLANWIRRYQTENFYDQIAVVSGVVQTIFYCDFFYLYVTKGRSWDDSNADTGLRSYSSI

SEQ ID NO: 2255 - protein, 172 aa, Homo sapiens
LSNKDVLSPQLKDENSKLRRKLNEVQSFSEAQTEMVRTLERKLEAKMIKEESDYHDLESVVQQVEQNLELMTKRAVKAENHVVKLKQEISLLQAQVSNFQRENEALRCGQGASLTVVKQNADVALQNLRVVMNSAQASIEQLVSGAETLNLVAEILKSIDRISEVKDEEEDS

SEQ ID NO: 2256 - protein, 486 aa, Homo sapiens
DSPRNRFEILGRPTRTPTRPGPRPAMEDLDALLSDLETTTSHMPRSGAPKERPAEPLTPPPSYGHQPQTGSGESSGASGDKDHLYSTVCKPRSPKPAAPAAPPFSSSSGVLGTGLCELDRLLQELNATQFNITDEIMSQFPSSKVASGEQKEDQSEDKKRPSLPSSPSPGLPKASATSATLELDRLMASLSDFRVQNHLPASGPTQPPVVSSTNEGSPSPPEPTGKGSLDTMLGLLQSDLSRRGVPTQAKGLCGSCNKPIAGQVVTALGRAWHPEHFVCGGCSTALGGSSFFEKDGAPFCPECYFERFSPRCGFCNQPIRHKMVTALGTHWHPEHFCCVSCGEPFGDEGFHEREGRPYCRRDFLQLFAPRCQGCQGPILDNYISALSALWHPDCFVCRECFAPFSGGSFFEHEGRPLCENHFHARRGSLCATCGLPVTGRCVSALGRRFHPDHFTCTFCLRPLTKGSFQERAGKPYCQPCFLKLFG

SEQ ID NO: 2257 - protein, 40 aa, Homo sapiens
FIYVNQSFAPSPDQEVGTLYECFGSDGKLVLHYCKSQAWG

SEQ ID NO: 2258 - protein, 354 aa, Homo sapiens
KLSCPCSHGTRVTAVRGPRLKAGVQWHDLGSLQPPPSGLKQSSHLSLSSSWDFRHAPTHPETYTCPKMIEMEQAEAQLAELDLLASMFPGENELIVNDQLAVAELKDCIEKKTMEGRSSKVYFTINMNLDVSDEKMAMFSLACILPFKYPAVLPEITVRSVLLSRSQQTQLNTDLTAFLQKHCHGDVCILNATEWVREHASGYVSRDTSSSPTTGSTVQSVDLIFTRLWIYSHHIYNKCKRKNILEWAKELSLSGFSMPGKPGVVCVEGPQSACEEFWARLRKLNWKRILIRHREDIPFDGTNDETERQRKFSIFEEKVFSVNGARGNHMDFGQLYQFLNTKGCGDVFQMFLWV

SEQ ID NO: 2259 - protein, 48 aa, Homo sapiens
EGICVYTFIYVHMYTRTCMHTYPYMYMNSVLISSEILLIPSKYLFESK

SEQ ID NO: 2260 - protein, 1554 aa, Homo sapiens
GALTWSHPLLAVCPQGVWLGSTPSGSPALLPPSHRVNAEPGCVVTNACASGPCPPHANCRDLWQTFSCTCQPGYYGPGCVDACLLNPCQNQGSCRHLPGAPHGYTCDCVGGYFGHHCEHRMDQQCPRGWWGSPTCGPCNCDVHKGFDPNCNKTNGQCHCKEFHYRPRGSDSCLPCDCYPVGSTSRSCAPHSGQCPCRPGALGRQCNSCDSPFAEVTASGCRVLYDACPKSLRSGVWWPQTKFGVLATVPCPRGALGLRGAGAAVRLCDEAQGWLEPDLFNCTSPAFRELSLLLDGLELNKTALDTMEAKKLAQRLREVTGHTDHYFSQDVRVTARLLAHLLAFESHQQGFGLTATQDAHFNENLLWAGSALLAPETGDLWAALGQRAPGGSPGSAGLVRHLEEYAATLARNMELTYLNPMGLVTPNIMLSIDRMEHPSSPRGARRYPRYHSNLFRGQDAWDPHTHVLLPSQSPRPSPSEVLPTSSSIENSTTSSVVPPPAPPEPEPGISIIILLVYRTLGGLLPAQFQAERRGARLPQNPVMNSPVVSVAVFHGRNFLRGILESPISLEFRLLQTANRSKAICVQWDPPGLAEQHGVWTARDCELVHRNGSHARCRCSRTGTFGVLMDASPRERLEGDLELLAVFTHVVVAVSVAALVLTAAILLSLRSLKSNVRGIHANVAAALGVAELLFLLGIHRTHNQLVCTAVVILLHYFFLSTFAWLFVQGLHLYRMQVEPRNVDRGAMRFYHALGWGVPAVLLGLAVGLDPEGYGNPDFCWISVHEPLIWSFAGPVVLVIVMNGTMFLLAARTSCSTGQREAKKTSALTLRSSFLLLLLVSASWLFGLLAVNHSILAFHYLHAGLCGLQGLAVLLLFCVLNADARAAWMPACLGRKAAPEEARPAPGLGPGAYNNTALFEESGLIRITLGASTVSSVSSARSGRTQDQDSQRGRSYLRDNVLVRHGSAADHTDHSLQAHAGPTDLDVAMFHRDAGADSDSDSDLSLEEERSLSIPSSESEDNGRTRGRFQRPLCRAAQSERLLTHPKDVDGNDLLSYWPALGECEAAPCALQTWGSERRLGLDTSKDAANNNQPDPALTSGDETSLGRAQRQRKGILKNRLQYPLVPQTRGAPELSWCRAATLGHRAVPAASYGRIYAGGGTGSLSQPASRYSSREQLDLLLRRQLSRERLEEAPAPVLRPLSRPGSQECMDAAPGRLEPKDRGSTLPRRQPPRDYPGAMAGRFGSRDALDLGAPREWLSTLPPPRRTRDLDPQPPPLPLSPQRQLSRDPLLPSRPLDSLSRSSNSREQLDQVPSRHPSREALGPLPQLLRAREDSVSGPSHGPSTEQLDILSSILASFNSSALSSVQSSSTPLGPHTTATPSATASVLGPSTPRSATSHSISELSPDSEPRDTQALLSATQAMDLRRRDYHMERPLLNQEHLEELGRWGSAPRTHQWRTWLQCSRARAYALLLQHLPVLVWLPRYPVRDWLLGDLLSGLSVAIMQLPQGLAYALLAGLPPVFGLYSSFYPVFIYFLFGTSRHISVESLCVPGPVDT

SEQ ID NO: 2261 - protein, 261 aa, Homo sapiens
EFGTSRSSRSMAEDLGLSFGETASVEMLPEHGSCRPKARSSSARWALTCCLVLLPFLAGLTTYLLVSQLRAQGEACVQFQALKGQEFAPSHQQVYAPLRADGDKPRAHLTVVRQTPTQHFKNQFPALHWEHELGLAFTKNRMNYTNKFLLIPESGDYFIYSQVTFRGMTSECSEIRQAGRPNKPDSITVVITKVTDSYPEPTQLLMGTKSVCEVGSNWFQPIYLGAMFSLQEGDKLMVNVSDISLVDYTKEDKTFFGAFLL

SEQ ID NO: 2262 - protein, 383 aa, Homo sapiens
ACGIRHEGALPGLTATPEAMLRFLPDLAFSFLLILALGQAVQFQEYVFLQFLGLDKAPSPQKFQPVPYILKKIFQDREAAATTGVSRDLCYVKELGVRGNVLRFLPDQGFFLYPKKISQASSCLQKLLYFNLSAIKEREQLTLAQLGLDLGPNSYYNLGPELELALFLVQEPHVWGQTTPKPGKMFVLRSVPWPQGAVHFNLLDVAKDWNDNPRKNFGLFLEILVKEDRDSGVNFQPEDTCARLRCSLHASLLVVTLNPDQCHPSRKRRAAIPVPKLSCKNLCHRHQLFINFRDLGWHKWIIAPKGFMANYCHGECPFSLTISLNSSNYAFMQALMHAVDPEIPQAVCIPTKLSPISMLYQDNNDNVILRHYEDMVVDECGCG

SEQ ID NO: 2263 - protein, 277 aa, Homo sapiens
ASRLPRGPGCGADMRPLLGLLLVFAGCTFALYLLSTRLPRGRRLGSTEEAGGRSLWFPSDLAELRELSEVLREYRKEHQAYVFLLFCGAYLYKQGFAIPGSSFLNVLAGALFGPWLGLLLCCVLTSVGATCCYLLSSIFGKQLVVSYFPDKVALLQRKVEENRNSLFFFLLFLRLFPMTPNWFLNLSAPILNIPIVQFFFSVLIGLIPYNFICVQTGSILSTLTSLDALFSWDTVFKLLAIAMVALIPGTLIKKFSQKHLQLNETSTANHIHSRKDT

SEQ ID NO: 2264 - protein, 48 aa, Homo sapiens
KSGWVWWLTPLIPALWEAQTEGSLRPEVKNRLSNITRPFFSKKKKILV

SEQ ID NO: 2265 - protein, 212 aa, Homo sapiens
HASGPGGLLRRRRGSGANMPVARSWVCRKTYVTPRRPFEKSRLDQELKLIGEYGLRNKREVWRVKFTLAKIRKAARELLTLDEKDPRRLFEGNALLRRLVRIGVLDEGKMKLDYILGLKIEDFLERRLQTQVFKLGLAKSIHHAHVLIQQCHIRVREQVVNILFFTVRLDSQKHIDFSLCFPIGVANPSHVKRKNASKGQGGAGARDDEEEE

SEQ ID NO: 2266 - protein, 321 aa, Homo sapiens
VAHTQWHTCQRLSQLTHRSILKYLLIDTHACQVLILKHTHASLSLPSCQECFPSSIPSASHMVSHPHPPPSPRWGQTPEGLPAASPCGPGPRSCFSSILPTGDSWGMLACLCTVLWHLPAVPALNRTGDPGPGPSIQKTYDLTRYLEHQLRSLAGTYLNYLGPPFNEPDFNPPRLGAETLPRATVDLEVWRSLNDKLRLTQNYEAYSHLLCYLRGLNRQAATAELRRSLAHFCTSLQGLLGSIAGVMAALGYPLPQPLPGTEPTWTPGPAHSDFLQKMDDFWLLKELQTWLWRSAKDFNRLKKKMQPPAAAVTLHLGAHGF

SEQ ID NO: 2267 - protein, 388 aa, Homo sapiens
RPRRGQGLVQEVQTENVTVAEGGVAEITCRLHQYDGSIVVIQNPARQTLFFNGTRALKDERFQLEEFSPRRVRIRLSDARLEDEGGYFCQLYTEDTHHQIATLTVLVAPENPVVEVREQAVEGGEVELSCLVPRSRPAATLRWYRDRKELKGVSSSQENGKVWSVASTVRFRVDRKDDGGIIICEAQNQALPSGHSKQTQYVLDVQYSPTARIHASQAVVREGDTLVLTCAVTGNPRPNQIRWNRGNESLPERAEAVGETLTLPGLVSADNGTYTCEASNKHGHARALYVLVVYGESRLRPTEGGGGAPDPGAVVEAQTSVPYAIVGGILALLVFLIICVLVGMVWCSVRQKGSYLTHEASGLDEQGEAREAFLNGSDGHKRKEEFFI

SEQ ID NO: 2268 - protein, 883 aa, Homo sapiens
RRRLPPASPPSSSVSSSLSPSAVVMACRWSTKESPRWRSALLLLFLAGVYGNGALAEHSENVHISGVSTACGETPEQIRAPSGIITSPGWPSEYPAKINCSWFIRANPGEIITISFQDFDIQGSRRCNLDWLTIETYKNIESYRACGSTIPPPYISSQDHIWIRFHSDDNISRKGFRLAYFSGKSEEPNCACDQFRCGNGKCIPEAWKCNNMDECGDRSDEEICAKEANPPTAAAFQPCAYNQFQCLSRFTKVYTCLPESLKCDGNIDCLDLGDEIDCDVPTCGQWLKYFYGTFNSPNYPDFYPPGSNCTWLIDTGDHRKVILRFTDFKLDGTGYGDYVKIYDGLEENPHKLLRVLTAFDSHAPLTVVSSSGQIRVHFCADKVNAARGFNATYQVDGFCLPWEIPCGGNWGCYTEQQRCDGYWHCPNGRDETNCTMCQKEEFPCSRNGVCYPRSDRCNYQNHCPNGSDEKNCFFCQPGNFHCKNNRCVFESWVCDSQDDCGDGSDEENCPVIVPTRVITAAVIGSLICGLLLVIALGCTCKLYSLRMFERRSFETQLSRVEAELLRREAPPSYGQLIAQGLIPPVEDFPVCSPNQASVLENLRLAVRSQLGFTSVRLPMAGRSSNIWNRIFNFARSRHSGSLALVSADGDEVVPSQSTSREPERNHTHRSLFSVESDDTDTENERRDMAGASGGVAAPLPQKVPPTTAVEATVGACASSSTQSTRGGHADNGRDVTSVEPPSVSPARHQLTSALSRMTQGLRWVRFTLGRSSSLSQNQSPLRQLDNGVSGREDDDDVEMLIPISDGSSDFDVNDCSRPLLDLASDQGQGLRQPYNATNPGVRPSNRDGPCERCGIVHTAQIPDTCLEVTLKNETSDDEALLLC

SEQ ID NO: 2269 - protein, 54 aa, Homo sapiens
VVRVTCCPPARSTTERTNAYDEEDCVEMVASGGWNDVACHTTMYFMCEFDKKNM

SEQ ID NO: 2270 - protein, 175 aa, Homo sapiens
GGRASWPEQAKEPRREGHTDKQQTEDVLAAGLRCLPHLPAICARRMSPAFRAMDVEPRAKGVLLEPFVHQVGGHSCVLRFNETTLCKPLVPREHQFYETLPAEMRKFTPQYKGKSQLLEGLPHWRGDVRDRGHGRPWQPSLEPSLPPTLCFPSLSSFSSSWPSAQHLTPSVFNPW

SEQ ID NO: 2271 - protein, 66 aa, Homo sapiens
RSGRTVVTGIGYSKALQSSNRNTKSLLQNEFMMVYSFRALSFKESTWATFQHGGEATKSRSLSSTQ

SEQ ID NO: 2272 - protein, 72 aa, Homo sapiens
ENITEKWKEIWMCRGNKKSCCWTFIKDRHLTVSCCKSKSGETLLICIFCSNLVGFFFFGIRGFSNWELVKPN

SEQ ID NO: 2273 - protein, 1007 aa, Homo sapiens
GSAPRAATAMARARPPPPPSPPPGLLPLLPPLLLLPLLLLPAGCRALEETLMDTKWVTSELAWTSHPESGWEEVSGYDEAMNPIRTYQVCNVRESSQNNWLRTGFIWRRDVQRVYVELKFTVRDCNSIPNIPGSCKETFNLFYYEADSDVASASSPFWMENPYVKVDTIAPDESFSRLDAGRVNTKVRSFGPLSKAGFYLAFQDQGACMSLISVRAFYKKCASTTAGFALFPETLTGAEPTSLVIAPGTCIPNAVEVSVPLKLYCNGDGEWMVPVGACTCATGHEPAAKESQCRPCPPGSYKAKQGEGPCLPCPPNSRTTSPAASICTCHNNFYRADSDSADSACTTVPSPPRGVISNVNETSLILEWSEPRDLGVRDDLLYNVICKKCHGAGGASACSRCDDNVEFVPRQLGLSEPRVHTSHLLAHTRYTFEVQAVNGVSGKSPLPPRYAAVNITTNQAAPSEVPTLRLHSSSGSSLTLSWAPPERPNGVILDYEMKYFEKSEGIASTVTSQMNSVQLDGLRPDARYVVQVRARTVAGYGQYSRPAEFETTSERGSGAQQLQEQLPLIVGSATAGLVFVVAVVVIAIVCLRKQRHGSDSEYTEKLQQYIAPGMKVYIDPFTYEDPNEAVREFAKEIDVSCVKIEEVIGAGEFGEVCRGRLKQPGRREVFVAIKTLKVGYTERQRRDFLSEASIMGQFDHPNIIRLEGVVTKSRPVMILTEFMENCALDSFLRLNDGQFTVIQLVGMLRGIAAGMKYLSEMNYVHRDLAARNILVNSNLVCKVSDFGLSRFLEDDPSDPTYTSSLGGKIPIRWTAPEAIAYRKFTSASDVWSYGIVMWEVMSYGERPYWDMSNQDVINAVEQDYRLPPPMDCPTALHQLMLDCWVRDRNLRPKFSQIVNTLDKLIRNAASLKVIASAQSGMSQPLLDRTVPDYTTFTTVGDWLDAIKMGRYKESFVSAGFASFDLVAQMTAEDLLRIGVTLAGHQKKILSSIQDMRLQMNQTLPVQV

SEQ ID NO: 2274 - protein, 167 aa, Homo sapiens
FRPRTKKATAMYLEHYLDSIENLPCELQRNFQLMRELDQRTEDKKAEIDILAAEYISTVKTLSPDQRVERLQKIQNAYSKCKEYSDDKVQLAMQTYEMVDKHIRRLDADLARFEADLKDKMEGSDFESSGGRGLKKGRGQKEKRGSRGRGRRTSEEDTPKKKKHKGG

SEQ ID NO: 2275 - protein, 47 aa, Homo sapiens
LPCSFCAQCMSSFERVWLQQSHFHNPRWNSRSPIRCYCQHWPHCVHC

SEQ ID NO: 2276 - protein, 114 aa, Homo sapiens
GPCKVCCITLAIMLQCHSFYRKDVQVEHPKSLNPKYSQIENFLSADMALKRKCLLSISDLDFWIWDAQPVGIMQTLQNLKKIPNPGCFWSQAFQIRDTQPILPLGGRYYITIRQ

SEQ ID NO: 2277 - protein, 117 aa, Homo sapiens
RIQRPLNSRSPNHSLFVKAELTAKQATMKLSVCLLLVTLALCCYQANAEFCPALVSELLDFFFISEPLFKLSLAKFDAPPEAVAAKLGVKRCTDQMSLQKRSLIAEVLVKILKKCSV

SEQ ID NO: 2278 - protein, 153 aa, Homo sapiens
LAPLRCQPGTRTQPRSHPAANDPSAAMSAAGARGLRATYHRLLDKVELMLPEKLRPLYNHPAGPRTVFFWAPIMKWGLVCAGLADMARPAEKLSTAQSAVLMATGFIWSRYSLVIIPKNWSLFAVNFFVGAAGASQLFRIWRYNQELKAKAHK

SEQ ID NO: 2279 - protein, 338 aa, Homo sapiens
EFARRRVFIAAREMSLLRSLRVFLVARTGSYPAGSLLRQSPQPRHTFYAGPRLSASASSKELLMKLRRKTGYSFVNCKKALETCGGDLKQAEIWLHKEAQKEGWSKAAKLQGRKTKEGLIGLLQEGNTTVLVEVNCETDFVSRNLKFQLLVQQVALGTMMHCQTLKDQPSAYSKGFLNSSELSGLPAGPDREGSLKDQLALAIGKLGENMILKRAAWVKVPSGFYVGSYVHGAMQSPSLHKLVLGKYGALVICETSEQKTNLEDVGRRLGQHVVGMAPLSVGSLDDEPGGEAETKMLSQPYLLDPSITLGQYVQPQGVSVVDFVRFECGEGEEAAETE

SEQ ID NO: 2280 - protein, 558 aa, Homo sapiens
NSRVWGPWTEPSAGSLRPMARKQNRNSKELGLVPLTDDTSHAGPPGPGRALLECDHLRSGVPGGRRRKDWSCSLLVASLAGAFGSSFLYGYNLSVVNAPTPYIKAFYNESWERRHGRPIDPDTLTLLWSVTVSIFAIGGLVGTLIVKMIGKVLGRKHTLLANNGFAISAALLMACSLQAGAFEMLIVGRFIMGIDGGVALSVLPMYLSEISPKEIRGSLGQVTAIFICIGVFTGQLLGLPELLGKESTWPYLFGVIVVPAVVQLLSLPFLPDSPRYLLLEKHNEARAVKAFQTFLGKADVSQEVEEVLAESRVQRSIRLVSVLELLRAPYVRWQVVTVIVTMACYQLCGLNAIWFYTNSIFGKAGIPPAKIPYVTLSTGGIETLAAVFSGLVIEHLGRRPLLIGGFGLMGLFFGTLTITLTLQDHAPWVPYLSIVGILAIIASFCSGPGGIPFILTGEFFQQSQRPAAFIIAGTVNWLSNFAVGLLFPFIQKSLDTYCFLVFATICITGAIYLYFVLPETKNRTYAEISQAFSKRNKAYPPEEKIDSAVTDGKINGRP

SEQ ID NO: 2281 - protein, 186 aa, Homo sapiens
AAGAVVSAMPKAKGKTRRQKFGYSVNRKRLNRNARRKAAPRIECSHIRHAWDHAKSVRQNLAEMGLAVDPNRAVPLRKRKVKAMEVDIEERPKELVRKPYVLNDLEAEASLPEKKGNTLSRDLIDYVRYMVENHGEDYKAMARDEKNYYQDTPKQIRSKINVYKRFYPAEWQDFLDSLQKRKMEVE

SEQ ID NO: 2282 - protein, 137 aa, Homo sapiens
SNLCLGNSWRWRWAKSRHHCIPTVTLSKRSGDIRGSHFSSPQRQRSQRVPGKETARVLRAGKQGRGQIPIPCPWPPPPPPPPPGSPGPGCRQFHQSLEAKARHPASVREMRGKVKMRRALRRAPASTRASSRQPNPK

SEQ ID NO: 2283 - protein, 309 aa, Homo sapiens
PPVPPASRSDMAQNLKDLAGRLPAGPRGMGTALKLLLGAGAVAYGVRESVFTVEGGHRAIFFNRIGGVQQDTILAEGLHFRIPWFQYPIIYDIRARPRKISSPTGSKDLQMVNISLRVLSRPNAQELPSMYQRLGLDYEERVLPSIVNEVLKSVVAKFNASQLITQRAQVSLLIRRELTERAKDFSLILDDVAITELSFSREYTAAVEAKQVAQQEAQRAQFLVEKAKQEQRQKIVQAEGEAEAAKMLGEALSKNPGYIKLRKIRAAQNISKTIATSQNRIYLTADNLVLNLQDESFTRGSDSLIKGKK

SEQ ID NO: 2284 - protein, 242 aa, Homo sapiens
SQFSLSQVLVDSAEEGSLAAAAELAAQKREQRLRKFRELHLMRNEARKLNHQEVVEEDKRLKLPANWEAKKARLEWELKEEEKKKECAARGEDYEKVKLLEISAEDAERWERKKKRKNPDLGFSDYAAAQLRQYHRLTKQIKPDMETYERLREKHGEEFFPTSNSLLHGTHVPSTEEIDRMVIDLEKQIEKRDKYSRRRPYNDDADIDYINERNAKFNKKAERFYGKYTAEIKQNLERGTAV

SEQ ID NO: 2285 - protein, 83 aa, Homo sapiens
LVSSTVNLLTEKAPWNSLAWTVTSYVFLKFLQGGGTGSTGMRDSALTLLGIGPSHRHSLSIRLSQHSSPAPMYSQTFHILVLG

SEQ ID NO: 2286 - protein, 213 aa, Homo sapiens
SGRECNMAKTYDYLFKLLLIGDSGVGKTCVLFRFSEDAFNSTFISTIGIDFKIRTIELDGKRIKLQIWDTAGQERFRTITTAYYRGAMGIMLVYDITNEKSFDNIRNWIRNIEEHASADVEKMILGNKCDVNDKRQVSKERGEKLALDYGIKFMETSAKANINVENAFFTLARDIKAKMDKKLEGNSPQGSNQGVKITPDQQKRSSFFRCVLL

SEQ ID NO: 2287 - protein, 27 aa, Homo sapiens
EETIHSENSYILEKYIPISANLTLTIA

SEQ ID NO: 2288 - protein, 219 aa, Homo sapiens
LHPAATSTAWLHVPPGLSMALSWVLTVLSLLPLLEAQIPLCANLVPVPITNATLDRITGKWFYIASAFRNEEYNKSVQEIQATFFYFTPNKTEDTIFLREYQTRQDQCIYNTTYLNVQRENGTISRYVGGQEHFAHLLILRDTKTYMLAFDVNDEKNWGLSVYADKPETTKEQLGEFYEALDCLRIPKSDVVYTDWKKDKCEPLEKQHEKERKQEEGES

SEQ ID NO: 2289 - protein, 342 aa, Homo sapiens
SSVAEFPERVQLSQPQNWNFSGAGGAWSLDFAEQLKWSAELARLGESIMDGKQGGMDGSKPAGPRDFPGIRLLSNPLMGDAVSDWSPMHEAAIHGHQLSLRNLISQGWAVNIITADHVSPLHEACLGGHLSCVKILLKHGAQVNGVTADWHTPLFNACVSGSWDCVNLLLQHGASVQPESDLASPIHEAARRGHVECVNSLIAYGGNIDHKISHLGTPLYLACENQQRACVKKLLESGADVNQGKGQDSPLHAVARTASEELACLLMDFGADTQAKNAEGKRPVELVPPESPLAQLFLEREGPPSLMQLCRLRIRKCFGIQQHHKITKLVLPEDLKQFLLHL

SEQ ID NO: 2290 - protein, 400 aa, Homo sapiens
KVLSIREPAHSTARKASEPSQPSQPSQPGGHLIARLRTMDLHLFDYSEPGNFSDISWPCNSSDCIVVDTVMCPNMPNKSVLLYTLSFIYIFIFVIGMIANSVVVWVNIQAKTTGYDTHCYILNLAIADLWVVLTIPVWVVSLVQHNQWPMGELTCKVTHLIFSINLFGSIFFLTCMSVDRYLSITYFTNTPSSRKKMVRRVVCILVWLLAFCVSLPDTYYLKTVTSASNNETYCRSFYPEHSIKEWLIGMELVSVVLGFAVPFSIIAVFYFLLARAISASSDQEKHSSRKIIFSYVVVFLVCWLPYHVAVLLDIFSILHYIPFTCRLEHALFTALHVTQCLSLVHCCVNPVLYSFINRNYRYELMKAFIFKYSAKTGLTKLIDASRVSETEYSALEQSTK

SEQ ID NO: 2291 - protein, 120 aa, Homo sapiens
DMAGLMTIVTSLLFLGVCAHHIIPTGSVVLPSPCCMFFVSKRIPENRVVSYQLSSRSTCLKAGVIFTTKKGQQFCGDPKQEWVQRYMKNLDAKQKKASPRARAVAVKGPVQRYPGNQTTC

SEQ ID NO: 2292 - protein, 328 aa, Homo sapiens
GGIGEIKQRPSCLGRCLDPSLSVLMNISLGLGSVFSAVISQKPSRDICQRGTSLTIQCQVDSQVTMMFWYRQQPGQSLTLIATANQGSEATYESGFVIDKFPISRPNLTFSTLTVSNMSPEDSSIYLCSAGRQGTYEQYFGPGTRLTVTEDLKNVFPPEVAVFEPSEAEISHTQKATLVCLATGFYPDHVELSWWVNGKEVHSGVSTDPQPLKEQPALNDSRYCLSSRLRVSATFWQNPRNHFRCQVQFYGLSENDEWTQDRAKPVTQIVSAEAWGRADCGFTSESYQQGVLSATILYEILLGKATLYAVLVSALVLMAMVKRKDSRG

SEQ ID NO: 2293 - protein, 293 aa, Homo sapiens
MVKVVPATRGNLPRSQLTGTHQHCQPREPKITASERLRRRPRATARLRAHAAPPEPPLAVFAPPSDRKELLALPVACDPVIASVMSWVQAASLIQGPGDKGDVFDEEADESLLAQREWQSNMQRRVKEGYRDGIDAGKAVTLQQGFNQGYKKGAEVILNYGRLRGTLSALLSWCHLHNNNSTLINKINNLLDAVGQCEEYVLKHLKSITPPSHVVDLLDSIEDMDLCHVVPAEKKIDEAKDERLCENNAEFNKNCSKSHSGIDCSYVECCRTQEHAHSGKPKPHMDFGTDSQF

SEQ ID NO: 2294 - protein, 265 aa, Homo sapiens
ESARWSRQLRRTLIRLSFPISCGRSHAFGGCKMAATSGTDEPVSGELVSVAHALSLPAESYGNDPDIEMAWAMRAMQHAEVYYKLISSVDPQFLKLTKVDDQIYSEFRKNFETLRIDVLDPEELKSESAKEKWRPFCLKFNGIVEDFNYGTLLRLDCSQGYTEENTIFAPRIQFFAIEIARNREGYNKAVYISVQDKEGEKGVNNGGEKRADSGEEENTKNGGEKGADSGEEKEEGINREDKTDKGGEKGKEADKEINKSGEKAM

SEQ ID NO: 2295 - protein, 167 aa, Homo sapiens
GAATLLRSASSAARKAAEAEQVWLHLHRYLSADRRVLGLREWGRPASERECSLCQRLKRELNMGDVEKGKKIFIMKCSQCHTVEKGGKHKTGPNLHGLFGRKTGQAPGYSYTAANKNKGIIWGEDTLMEYLENPKKYIPGTKMIFVGIKKKEERADLIAYLKKATNE

SEQ ID NO: 2296 - protein, 182 aa, Homo sapiens
EGRRGKFGGKLCNFLFYFHSNSAESRMDVLFVAIFAVPLILGQEYEDEERLGEDEYYQVVYYYTVTPSYDDFSADFTIDYSIFESEDRLNRLDKDITEAIETTISLETARADHPKPVTVKPVTTEPQSPRSEAMPCPVLRSPIPLPPVRVPLFRWGCISCKKVGRRLLMTLWMGVWQEEIGR

SEQ ID NO: 2297 - protein, 76 aa, Homo sapiens
GGGSSPRELAGAAGLTVTSQAVAARRQQPSFSRARAPAHSLRAALSLASSARSWGAVSRDRGPCPPAIMYQSSNKC

SEQ ID NO: 2298 - protein, 1019 aa, Homo sapiens
MEPGEVKDRILENISLSVKKLQSYFAACEDEIPAIRNHDKVLQRLCEHLDHALLYGLQDLSSGYWVLVVHFTRREAIKQIEVLQHVATNLGRSRAWLYLALNENSLESYLRLFQENLGLLHKYYVKNALVCSHDHLTLFLTLVSGLEFIRFELDLDAPYLDLAPYMPDYYKPQYLLDFEDRLPSSVHGSDSLSLNSFNSVTSTNLEWDDSAIAPSSEDYDFGDVFPAVPSVPSTDWEDGDLTDTVSGPRSTASDLTSSKASTRSPTQRQNPFNEEPAETVSSSDTTPVHTTSQEKEEAQALDPPDACTELEVIRVTKKKKIGKKKKSRSDEEASPLHPACSQKKCAKQGDGDSRNGSPSLGRDSPDTMLASPQEEGEGPSSTTESSERSEPGLLIPEMKDTSMERLGQPLSKVIDQLNGQLDPSTWCSRAEPPDQSFRTGSPGDAPERPPLCDFSEGLSAPMDFYRFTVESPSTVTSGGGHHDPAGLGQPLHVPSSPEAAGQEEEGGGGEGQTPRPLEDTTREAQELEAQLSLVREGPVSEPEPGTQEVLCQLKRDQPSPCLSSAEDSGVDEGQGSPSEMVHSSEFRVDNNHLLLLMIHVFRENEEQLFKMIRMSTGHMEGNLQLLYVLLTDCYVYLLRKGATEKPYLVEEAVSYNELDYVSVGLDQQTVKLVCTNRRKQFLLDTADVALAEFFLASLKSAMIKGCREPPYPSILTDATMEKLALAKFVAQESKCEASAVTVRFYGLVHWEDPTDESLGPTPCHCSPPEGTITKEGMLHYKAGTSYLGKEHWKTCFVVLSNGILYQYPDRTDVIPLLSVNMGGEQCGGCRRANTTDRPHAFQVILSDPPCLELSAESEAEMAEWMQHLCQAVSKGVIPQGVAPSPCIPCCLVLTDDRLFTCHEDCQTSFFRSLGTAKLGDISAVSTEPGKEYCVLEFSQDSQQLLPPWVIYLSCTSELDRLLSALNSGWKTIYQVDLPHTAIQEASNKKKFEDALSLIHSAWQRSDSLCRGRASRDPWC

SEQ ID NO: 2299 - protein, 788 aa, Homo sapiens
ARRADTVLLESPSMLQGLLPVSLLLSVAVSAIKELPGVKKYEVVYPIRLHPLHKREAKEPEQQEQFETELKYKMTINGKIAVLYLKKNKNLLAPGYTETYYNSTGKEITTSPQIMDDCYYQGHILNEKVSDASISTCRGLRGYFSQGDQRYFIEPLSPIHRDGQEHALFKYNPDEKNYDSTCGMDGVLWAHDLQQNIALPATKLVKLKDRKVQEHEKYIEYYLVLDNGEFKRYNENQDEIRKRVFEMANYVNMLYKKLNTHVALVGMEIWTDKDKIKITPNASFTLENFSKWRGSVLSRRKRHDIAQLITATELAGTTVGLAFMSTMCSPYSVGVVQDHSDNLLRVAGTMAHEMGHNFGMFHDDYSCKCPSTICVMDKALSFYIPTDFSSCSRLSYDKFFEDKLSNCLFNAPLPTDIISTPICGNQLVEMGEDCDCGTSEECTNICCDAKTCKIKATFQCALGECCEKCQFKKAGMVCRPAKDECDLPEMCNGKSGNCPDDRFQVNGFPCHHGKGHCLMGTCPTLQEQCTELWGPGTEVADKSCYNRNEGGSKYGYCRRVDDTLIPCKANDTMCGKLFCQGGSDNLPWKGRIVTFLTCKTFDPEDTSQEIGMVANGTKCGDNKVCINAECVDIEKAYKSTNCSSKCKGHAVCDHELQCQCEEGWIPPDCDDSSVVFHFSIVVGVLFPMAVIFVVVAMVIRHQSSREKQKKDQRPLSTTGTRPHKQKRKPQMVKAVQPQEMSQMKPHVYDLPVEGNEPPASFHKDTNALPPTVFKDNPMSTPKDSNPKA

SEQ ID NO: 2300 - protein, 417 aa, Homo sapiens
MGLLLMILASAVLGSFLTLLAQFFLLYRRQPEPPADEAARAGEGFRYIKPVPGLLLREYLYGGGRDEEPSGAAPEGGATPTAAPETPAPPTRETCYFLNATILFLFRELRDTALTRRWVTKKIKVEFEELLQTKTAGRLLEGLSLRDVFLGETVPFIKTIRLVRPVVPSATGEPDGPEGEALPAACPEELAFEAEVEYNGGFHLAIDVDLVFGKSAYLFVKLSRVVGRLRLVFTRVPFTHWFFSFVEDPLIDFEVRSQFEGRPMPQLTSIIVNQLKKIIKRKHTLPNYKIRFKPFFPYQTLQGFEEDEEHIHIQQWALTEGRLKVTLLECSRLLIFGSYDREANVHCTLELSSSVWEEKQRSSIKTGTISLTAVFMGWHRVSEAFPGLWYKLLVDLPFWGLEDGGPLLTVPLRQCPG

SEQ ID NO: 2301 - protein, 257 aa, Homo sapiens
EVALFCFEMAAGMYLEHYLDSIENLPFELQRNFQLMRDLDQRTEDLKAEIDKLATEYMSSARSLSSEEKLALLKQIQEAYGKCKEFGDDKVQLAMQTYEMVDKHIRRLDTDLARFEADLKEKQIESSDYDSSSSKGKKKGRTQKEKKAARARSKGKNSDEEAPKTAQKKLKLVRTSPEYGMPSVTFGSVHPSDVLDMPVDPNEPTYCLCHQVSYGEMIGCDNPDCSIEWFHFACVGLTTKPRGKWFCPRCSQERKKK

SEQ ID NO: 2302 - protein, 101 aa, Homo sapiens
PSVASLARRFSGRALWPPSHSVPGNRALCPRLLHGTTLPGGNQRELARQKNMKKQSDSVKGKRRDDGLSAAARKQRDSTPRDSEIMQQKQKKANEKKEEPK

SEQ ID NO: 2303 - protein, 223 aa, Homo sapiens
VCAGIRDPCSTPLAKPAAGGAENLSFGKQPGLETNILKMTTPNKTPPGADPKQLERTGTVREIGSQAVWSLSSCKPGFGVDQLRDDNLETYWQSDGSQPHLVNIQFRRKTTVKTLCIYADYKSDESYTPSKISVRVGNNFHNLQEIRQLELVEPSGWIHVPLTDNHKKPTRTFMIQIAVLANHQNGRDTHMRQIKIYTPVEESSIGKFPRCTTIDFMMYRSIR

SEQ ID NO: 2304 - protein, 316 aa, Homo sapiens
PPLPPRSFPNLFSRPEPLPEPGRRGCNRSREPAARAPSPPPPFEGAPGRAMVKVTFNSALAQKEAKKDEPKSGEEALIIPPDAVAVDCKDPDDVVPVGQRRAWCWCMCFGLAFMLAGVILGGAYLYKYFALQPDDVYYCGIKYIKDDVILNEPSADAPAALYQTIEENIKIFEEEEVEFISVPVPEFADSDPANIVHDFNKKLTAYLDLNLDKCYVIPLNTSIVMPPRNLLELLINIKAGTYLPQSYLIHEHMVITDRIENIDHLGFFIYRLCHDKETYKLQRRETIKGIQKREASNCFAIRHFENKFAVETLICS

SEQ ID NO: 2305 - protein, 378 aa, Homo sapiens
VESRSAWHEGEDQIDRLDFIRNQMNLLTLDVKKKIKEVTEEVANKVSCAMTDEICRLSVLVDEFCSEFHPNPDVLKIYKSELNKHIEDGMGRNLADRCTDEVNALVLQTQQEIIENLKPLLPAGIQDKLHTLIPCKKFDLSYNLNYHKLCSDFQEDIVFRFSLGWSSLVHRFLGPRNAQRVLLGLSEPIFQLPRSLASTPTAPTTPATPDNASQEELMITLVTGLASVTSRTSMGIIIVGGVIWKTIGWKLLSVSLTMYGALYLYERLSWTTHAKERAFKQQFVNYATEKLRMIVSSTSANCSHQVKQQIATTFARLCQQVDITQKQLEEEIARLPKEIDQLEKIQNNSKLLRNKAVQLENELENFTKQFLPSSNEES

SEQ ID NO: 2306 - protein, 351 aa, Homo sapiens
ASGSPAPSSSSAMAAACGPGAAGYCLLLGLHLFLLTAGPALGWNDPDRMLLRDVKALTLHYDRYTTSRRLDPIPQLKCVGGTAGCDSYTPKVIQCQNKGWDGYDVQWECKTDLDIAYKFGKTVVSCEGYESSEDQYVLRGSCGLEYNLDYTELGLQKLKESGKQHGFASFSDYYYKWSSADSCNMSGLITIVVLLGIAFVVYKLFLSDGQYSPPPYSEYPPFSHRYQRFTNSAGPPPPGFKSEFTGPQNTGHGATSGFGSAFTGQQGYENSGPGFWTGLGTGGILGYLFGSNRAATPFSDSWYYPSYPPSYPGTWNRAYSPLHGGSGSYSVCSNSDTKTRTASGYGGTRRR

SEQ ID NO: 2307 - protein, 321 aa, Homo sapiens
THVVMTGMCYAPHQVLSYINGVTTSKPGVSLVYSMPSRNLSLRLEGLQEKDSGPYSCSVNVQDKQGKSRGHSIKTLELNVLVPPAPPSCRLQGVPHVGANVTLSCQSPRSKPAVQYQWDRQLPSFQTFFAPALDVIRGSLSLTNLSSSMAGVYVCKAHNEVGTAQCNVTLEVSTGPGAAVVAGAVVGTLVGLGLLAGLVLLYHRRGKALEEPANDIKEDAIAPRTLPWPKSSDTISKNGTLSSVTSARALRPPHGPPRPGALTPTPSLSSQALPSPRLPTTDGAHPQPISPIPGGVSSSGLSRMGAVPVMVPAQSQAGSLV

SEQ ID NO: 2308 - protein, 383 aa, Homo sapiens
ELARRPKQQSSEKSRNMIRNWLTIFILFPLKLVEKCESSVSLTVPPVVKLENGSSTNVSLTLRPPLNATLVITFEITFRSKNITILELPDEVVVPPGVTNSSFQVTSQNVGQLTVYLHGNHSNQTGPRIRFLVIRSSAISIINQVIGWIYFVAWSISFYPQVIMNWRRKSVIGLSFDFVALNLTGFVAYSVFNIGLLWVPYIKEQFLLKYPNGVNPVNSNDVFFSLHAVVLTLIIIVQCCLYERGGQRVSWPAIGFLVLAWLFAFVTMIVAAVGVITWLQFLFCFSYIKLAVTLVKYFPQAYMNFYYKSTEGWSIGNVLLDFTGGSFSLLQMFLQSYNNDQWTLIFGDPTKFGLGVFSIVFDVVFFIQHFCLYRKRPGYDQLN

SEQ ID NO: 2309 - protein, 274 aa, Homo sapiens
GERAGRRRGRLGVWAQPQPLLPRPVGSRREMQPPGPPPAYAPTNGDFTFVSSADAEDLSGSIASPDVKLNLGGDFIKESTATTFLRQRGYGWLLEVEDDDPEDNKPLLEELDIDLKDIYYKIRCVLMPMPSLGFNRQVVRDNPDFWGPLAVVLFFSMISLYGQFRVVSWIITIWIFGSLTIFLLARVLGGEVAYGQVLGVIGYSLLPLIVIAPVLLVVGSFEVVSTLIKLFGVFWAAYSAASLLVGEEFKTKKPLLIYPIFLLYIYFLSLYTGV

SEQ ID NO: 2310 - protein, 973 aa, Homo sapiens
MTCFKGQKGEQRSHAFEANKDHKAKVPSPNLYSQLNALQFTVDERSILWLNQFLLDLKQSLNQFMAVYKLNDNSKSDEHVDVRVDGLMLKFVIPSEVKSECHQDQPRAISIQSSEMIATNTRHCPNCRHSDLEALFQDFKDCDFFSKTYTSFPKSCDNFNLLHPIFQRHAHEQDTKMHEIYKGNITPQLNKNTLKTSAATDVWAVYFSQFWIDYEGMKSGKGRPISFVDSFPLSIWICQPTRYAESQKEPQTCNQVSLNTSQSESSDLAGRLKRKKLLKEYYSTESEPLTNGGQKPSSSDTFFRFSPSSSEADIHLLVHVHKHVSMQINHYQYLLLLFLHESLILLSENLRKDVEAVTGSPASQTSICIGILLRSAELALLLHPVDQANTLKSPVSESVSPVVPDYLPTENGDFLSSKRKQISRDINRIRSVTVNHMSDNRSMSVDLSHIPLKDPLLFKSASDTNLQKGISFMDYLSDKHLGKISEDESSGLVYKSGSGEIGSETSDKKDSFYTDSSSVLNYREDSNILSFDSDGNQNILSSTLTSKGNETIESIFKAEDLLPEAASLSENLDISKEETPPVRTLKSQSSLSGKPKERCPPNLAPLCVSYKNMKRSSSQMSLDTISLDSMILEEQLLESDGSDSHMFLEKGNKKNSTTNYRGTAESVNAGANLQNYGETSPDAISTNSEGAQENHDDLMSVVVFKITGVNGEIDIRGEDTEICLQVNQVTPDQLGNISLRHYLCNRPVGSDQKAVIHSKSSPEISLRFESGPGAVIHSLLAEKNGFLQCHIENFSTEFLTSSLMNIQHFLEDETVATVMPMKIQVSNTKINLKDDSPRSSTVSLEPAPVTVHIDHLVVERSDDGSFHIRDSHMLNTGNDLKENVKSDSVLLTSGKYDLKKQRSVTQATQTSPGVPWPSQSANFPEFSFDFTREQLMEENESLKQELAKAKMALAEAHLEKDALLHHIKKMTVE

SEQ ID NO: 2311 - protein, 253 aa, Homo sapiens
TAAMSIFTPTNQIRLTNVAVVRMKRAGKRFEIACYKNKVVGWRSGVEKDLDEVLQTHSVFVNVSKGQVAKKEDLISAFGTDDQTEICKQILTKGEVQVSDKERHTQLEQMFRDIATIVADKCVNPETKRPYTVILIERAMKDIHYSVKTNKSTKQQALEVIKQLKEKMKIERAHMRLRFILPVNEGKKLKEKLKPLIKVIESEDYGQQLEIVCLIDPGCFREIDELIKKETKGKGSLEVLNLKDVEEGDEKFE

SEQ ID NO: 2312 - protein, 100 aa, Homo sapiens
NISNKAEVSSHPSVISHSMDSFGQPRPEDNQSVLRRMQKKYWKTKQVFIKATGKKEDEHLVASDAELDAKLEVFHSVQETCTELLKIIEKYQLRLNGMKS

SEQ ID NO: 2313 - protein, 734 aa, Homo sapiens
AEGCAERRGTEPVVELSMSWESGAGPGLGSQGMDLVWSAWYGKCVKGKGSLPLSAHGIVVAWLSRAEWDQVTVYLFCDDHKLQRYALNRITVWRSRSGNELPLAVASTADLIRCKLLDVTGGLGTDELRLLYGMALVRFVNLISERKTKFAKVPLKCLAQEVNIPDWIVDLRHELTHKKMPHINDCRRGCYFVLDWLQKTYWCRQLENSLRETWELEEFREGIEEEDQEEDKNIVVDDITEQKPEPQDDGKSTESDVKADGDSKGSEEVDSHCKKALSHKELYERARELLVSYEEEQFTVLEKFRYLPKAIKAWNNPSPRVECVLAELKGVTCENREAVLDAFLDDGFLVPTFEQLAALQIEYEENVDLNDVLVPKPFSQFWQPLLRGLHSQNFTQALLERMLSELPALGISGIRPTYILRWTVELIVANTKTGRNARRFSAGQWEARRGWRLFNCSASLDWPRMVESCLGSPCWASPQLLRIIFKAMGQGLPDEEQEKLLRICSIYTQSGENSLVQEGSEASPIGKSPYTLDSLYWSVKPASSSFGSEAKAQQQEEQGSVNDVKEEEKEEKEVLPDQVEEEEENDDQEEEEEDEDDEDDEEEDRMEVGPFSTGQESPTAENARLLAQKRGALQGSAWQVSSEDVRWDTFPLGRMPGQTEDPAELMLENYDTMYLLDQPVLEQRLEPSTCKTDTLGLSCGVGSGNCSNSSSSNFEGLLWSQGQLHGLKTGLQLF

SEQ ID NO: 2314 - protein, 462 aa, Homo sapiens
EPRRNFRDDSTRPRTRGRTRGRRRRACRSAEGTGLRSLLLPPRLQLPAGPFSRCRWDPVSSPRPSTMPPKKGGDGIKPPPIIGRFGTSLKIGIVGLPNVGKSTFFNVLTNSQASAENFPFCTIDPNESRVPVPDERFDFLCQYHKPASKIPAFLNVVDIAGLVKGAHNGQGLGNAFLSHISACDGIFHLTRAFEDDDITHVEGSVDPIRDIEIIHEELQLKDEEMIGPIIDKLEKVAVRGGDKKLKPEYDIMCKVKSWVIDQKKPVRFYHDWNDKEIEVLNKHLFLTSKPMVYLVNLSEKDYIRKKNKWLIKIKEWVDKYDPGALVIPFSGALELKLQELSAEERQKYLEANMTQSALPKIIKAGFAALQLEYFFTAGPDEVRAWTIRKGTKAPQAAGKIHTDFEKGFIMAEVMKYEDFKEEGSENAVKAAGKYRQQGRNYIVEDGDIIFFKFNTPQQPKKK

SEQ ID NO: 2315 - protein, 280 aa, Homo sapiens
RSFSLSFSLLSPSEMMALGAAGATRVFVAMVAAALGGHPLLGVSATLNSVLNSNAIKNLPPPLGGAAGHPGSAVSAAPGILYPGGNKYQTIDNYQPYPCAEDEECGTDEYCASPTRGGDAGVQICLACRKRRKRCMRHAMCCPGNYCKNGICVSSDQNHFRGEIEETITESFGNDHSTLDGYSRRTTLSSKMYHTKGQEGSVCLRSSDCASGLCCARHFWSKICKPVLKEGQVCTKHRRKGSHGLEIFQRCYCGEGLSCRIQKDHHQASNSSRLHTCQRH

SEQ ID NO: 2316 - protein, 1222 aa, Homo sapiens
KFKLIKIMLLTLIILLPVVSKFSFVSLSAPQHWSCPEGTLAGNGNSTCVGPAPFLIFSHGNSIFRIDTEGTNYEQLVVDAGVSVIMDFHYNEKRIYWVDLERQLLQRVFLNGSRQERVCNIEKNVSGMAINWINEEVIWSNQQEGIITVTDMKGNNSHILLSALKYPANVAVDPVERFIFWSSEVAGSLYRADLDGVGVKALLETSEKITAVSLDVLDKRLFWIQYNREGSNSLICSCDYDGGSVHISKHPTQHNLFAMSLFGDRIFYSTWKMKTIWIANKHTGKDMVRINLHSSFVPLGELKVVHPLAQPKAEDDTWEPEQKLCKLRKGNCSSTVCGQDLQSHLCMCAEGYALSRDRKYCEGNDWKYCEDVNECAFWNHGCTLGCKNTPGSYYCTCPVGFVLLPDGKRCHQLVSCPRNVSECSHDCVLTSEGPLCFCPEGSVLERDGKTCSGCSSPDNGGCSQLCVPLSPVSWECDCFPGYDLQLDEKSCAASGPQPFLLFANSQDIRHMHFDGTDYGTLLSQQMGMVYALDHDPVENKIYFAHTALKWIERANMDGSQRERLIEEGVDVPEGLAVDWIGRRFYWTDRGKSLIGRSDLNGKRSKIITIENISQPRGIAVHPMAKRLFWTDTGINPRIESSSLQGLGRLVIASSDLIWPSGITIDFLTDKLYWCDAKQSVIEMANLDGSKRRRLTQNDVGHPFAVAVFEDYVWFSDWAMPSVIRVNKRTGKDRVRLQGSMLKPSSLVVVHPLAKPGADPCLYQNGGCEHICKKRLGTAWCSCREGFMKASDGKTCLALDGHQLLAGGEVDLKNQVTPLDILSKTRVSEDNITESQHMLVAEIMVSDQDDCAPVGCSMYARCISEGEDATCQCLKGFAGDGKLCSDIDECEMGVPVCPPASSKCINTEGGYVCRCSEGYQGDGIHCLDIDECQLGVHSCGENASCTNTEGGYTCMCAGRLSEPGLICPDSTPPPHLREDDHHYSVRNSDSECPLSHDGYCLHDGVCMYIEALDKYACNCVVGYIGERCQYRDLKWWELRHAGHGQQQKVIVVAVCVVVLVMLLLLSLWGAHYYRTQKLLSKNPKNPYEESSRDVRSRRPADTEDGMSSCPQPWFVVIKEHQDLKNGGQPVAGEDGQAADGSMQPTSWRQEPQLCGMGTEQGCWIPVSSDKGSCPQVMERSFHMPSYGTQTLEGGVEKPHSLLSANPLWQQRALDPPHQMELTQ

SEQ ID NO: 2317 - protein, 199 aa, Homo sapiens
SSAMGSRSSHAAVIPDGDSIRRETGFSQASLLRLHHRFRALDRNKKGYLSRMDLQQIGALAVNPLGDRIIESFFPDGSQRVDFPGFVRVLAHFRPVEDEDTETQDPKKPEPLNSRRNKLHYAFQLYDLDRDGKISRHEMLQVLRLMVGVQVTEEQLENIADRTVQEADEDGDGAVSFVEFTKSLEKMDVEHKMSIRILK

SEQ ID NO: 2318 - protein, 135 aa, Homo sapiens
ISSCPHTAYEGSMSTLSNFTQTLEDVFRRIFITYMDNWRQNTTAEQEALQAKVDAENFYYVILYLMVMIGMFSFIIVAILVSTVKSKRREHSNDPYHQYIVEDWQEKYKSQILNLEESKATIHENIGAAGFKMSP

SEQ ID NO: 2319 - protein, 646 aa, Homo sapiens
GMPRSRGGRAAPGPPPPPPPPGQAPRWSRWRVPGRLLLLLLPALCCLPGAARAAAAAAGAGNRAAVAVAVARADEAEAPFAGQNWLKSYGYLLPYDSRASALHSAKALQSAVSTMQQFYGIPVTGVLDQTTIEWMKKPRCGVPDHPHLSRRRRNKRYALTGQKWRQKHITYSIHNYTPKVGELDTRKAIRQAFDVWQKVTPLTFEEVPYHEIKSDRKEADIMIFFASGFHGDSSPFDGEGGFLAHAYFPGPGIGGDTHFDSDEPWTLGNANHDGNDLFLVAVHELGHALGLEHSSDPSAIMAPFYQYMETHNFKLPQDDLQGIQKIYGPPAEPLEPTRPLPTLPVRRIHSPSERKHERQPRPPRPPLGDRPSTPGTKPNICDGNFNTVALFRGEMFVFKDRWFWRLRNNRVQEGYPMQIEQFWKGLPARIDAAYERADGRFVFFKGDKYWVFKEVTVEPGYPHSLGELGSCLPREGIDTALRWEPVGKTYFFKGERYWRYSEERRATDPGYPKPITVWKGIPQAPQGAFISKEGYYTYFYKGRDYWKFDNQKLSVEPGYPRNILRDWMGCNQKEVERRKERRLPQDDVDIMVTINDVPGSVNAVAVVIPCILSLCILVLVYTIFQFKNKTGPQPVTYYKRPVQEWV

SEQ ID NO: 2320 - protein, 329 aa, Homo sapiens
SRLSLQFYVSFRRTGLFTCKLIVEIFFRNYMNDSLRTNVFVRFQPETIACACIYLAARALQIPLPTRPHWFLLFGTTEEEIQEICIETLRLYTRKKPNYELLEKEVEKRKVALQEAKLKAKGLNPDGTPALSTLGGFSPASKPSSPREVKAEEKSPISINVKTVKKEPEDRQQASKSPYNGVRKDSKRSRNSRSASRSRSRTRSRSRSHTPRRHYNNRRSRSGTYSSRSRSRSRSHSESPRRHHNHGSPHLKAKHTRDDLKSSNRHGHKRKKSRSRSQSKSRDHSDAAKKHRHERGHHRDRRERSRSFERSHKSKHHGGSRSGHGRHRR

SEQ ID NO: 2321 - protein, 1090 aa, Homo sapiens
DCRLQAAMPTNFTVVPVEAHADGGGDETAERTEAPGTPEGPEPERPSPGDGNPRENSPFLNNVEVEQESFFEGKNMALFEEEMDSNPMVSSLLNKLANYTNLSQGVVEHEEDEESRRREAKAPRMGTFIGVYLPCLQNILGVILFLRLTWIVGVAGVLESFLIVAMCCTCTMLTAISMSAIATNGVVPAGGSYYMISRSLGPEFGGAVGLCFYLGTTFAGAMYILGTIEIFLTYISPGAAIFQAEAAGGEAAAMLHNMRVYGTCTLVLMALVVFVGVKYVNKLALVFLACVVLSILAIYAGVIKSAFDPPDIPVCLLGNRTLSRRSFDACVKAYGIHNNSATSALWGLFCNGSQPSAACDEYFIQNNVTEIQGIPGAASGVFLENLWSTYAHAGAFVEKKGVPSVPVAEESRASTLPYVLTDIAASFTLLVGIYFPSVTGIMAGSNRSGDLKDAQKSIPTGTILAIVTTSFIYLSCIVLFGACIEGVVLRDKFGEALQGNLVIGMLAWPSPWVIVIGSFFSTCGAGLQTLTGAPRLLQAIARDGIVPFLQVFGHGKANGEPTWALLLTVLICETGILIASLDSVAPILSMFFLMCYLFVNLACAVQTLLRTPNWRPRFKFYHWTLSFLGMSLCLALMFICSWYYALSAMLIAGCIYKYIEYRGAEKEWGDGIRGLSLNAARYALLRVEHGPPHTKNWRPQVLVMLNLDAEQAMKHPRLLSFTSQLKAGKGLTIVGSVLEGTYLDKHMEAQRAEENIRSLMSTEKTKGFCQLVVSSSLRDGMSHLIQSAGLGGLKHNTVLMAWPASWKQEDNPFSWKNFVDTVRDTTAAHQALLVAKNVDSFPQNQERFGGGHIDVWWIVHDGGMLMLLPFLLRQHKVWRKCRMRIFTVAQVDDNSIQMKKDLQMFLYHLRISAEVEVVEMVENDISAFTYERTLMMEQRSQMLKQMQLSKNEQEREAQLIHDRNTASHTAAAARTQAPPTPDKVQMTWTREKLIAEKYRSRDTSLSGFKDLFSMKPDQSNVRRMHTAVKLNGVVLNKSQDAQLVLLNMPGPPKNRQGDENYMEFLEVLTEGLNRVLLVRGGGREVITIYS

SEQ ID NO: 2322 - protein, 151 aa, Homo sapiens
TSRRVTMKFNPFVTSDRSKNRKRHFNAPSHVRRKIMSSPLSKELRQKYNVRSMPIRKDDEVQVVRGHYKGQQIGKVVQVYRKKYVIYIERVQREKANGTTVHVGIHPSKVVITRLKLDKDRKKILERKAKSRQVGKEKGKYKEELIEKMQE

SEQ ID NO: 2323 - protein, 1245 aa, Homo sapiens
GCPHAGGKGRVPTGGLTGGRTWSPSAAPRSCPRPGPTPAPGAMDKLPPSMRKRLYSLPQQVGAKAWIMDEEEDAEEEGAGGRQDPSRRSIRLRPLPSPSPSAAAGGTESRSSALGAADSEGPARGAGKSSTNGDCRRFRGSLASLGSRGGGSGGTGSGSSHGHLHDSAEERRLIAEGDASPGEDRTPPGLAAEPERPGASAQPAASPPPPQQPPQPASASCEQPSVDTAIKVEGGAAAGDQILPEAEVRLGQAGFMQRQFGAMLQPGVNKFSLRMFGSQKAVEREQERVKSAGFWIIHPYSDFRFYWDLTMLLLMVGNLIIIPVGITFFKDENTTPWIVFNVVSDTFFLIDLVLNFRTGIVVEDNTEIILDPQRIKMKYLKSWFMVDFISSIPVDYIFLIVETRIDSEVYKTARALRIVRFTKILSLLRLLRLSRLIRYIHQWEEIFHMTYDLASAVVRIVNLIGMMLLLCHWDGCLQFLVPMLQDFPDDCWVSINNMVNNSWGKQYSYALFKAMSHMLCIGYGRQAPVGMSDVWLTMLSMIVGATCYAMFIGHATALIQSLDSSRRQYQEKYKQVEQYMSFHKLPPDTRQRIHDYYEHRYQGKMFDEESILGELSEPLREEIINFNCRKLVASMPLFANADPNFVTSMLTKLRFEVFQPGDYIIREGTIGKKMYFIQHGVVSVLTKGNKETKLADGSYFGEICLLTRGRRTASVRADTYCRLYSLSVDNFNEVLEEYPMMRRAFETVALDRLDRIGKKNSILLHKVQHDLNSGVFNYQENEIIQQIVQHDREMAHCAHRVQAAASATPTPTPVIWTPLIQAPLQAAAATTSVAIALTHHPRLPAAIFRPPPGSGLGNLGAGQTPRHLKRLQSLIPSALGSASPASSPSQVDTPSSSSFHIQQLAGFSAPAGLSPLLPSSSSSPPPGACGSPSAPTPSAGVAATTIAGFGHFHKALGGSLSSSDSPLLTPLQPGARSPQAAQPSPAPPGARGGLGLPEHFLPPPPSSRSPSSSPGQLGQPPGELSLGLATGPLSTPETPPRQPEPPSLVAGASGGASPVGFTPRGGLSPPGHSPGPPRTFPSAPPRASGSHGSLLLPPASSPPPPQVPQRRGTPPLTPGRLTQDLKLISASQPALPQDGAQTLRRASPHSSGESMAAFPLFPRAGGGSGGSGSSGGLGPPGRPYGAIPGQHVTLPRKTSSGSLPPPLSLFGARATSSGGPPLTAGPQREPGARPEPVRSKLPSNL

SEQ ID NO: 2324 - protein, 62 aa, Homo sapiens
EYKQWERRFLSCQNRNDLGYGKPRKGGGLLLVPVKDASRICSLTYLLGSHWNNLVVRSPVLG

SEQ ID NO: 2325 - protein, 503 aa, Homo sapiens
LVALKNWKPKGTNIPAPQSPVFGEAVSGVYMMTKVLGMAPVLGPRPPQEQVGPLMVKVEEKEEKGKYLPSLEMFRQRFRQFGYHDTPGPREALSQLRVLCCEWLRPEIHTKEQILELLVLEQFLTILPQELQAWVQEHCPESAEEAVTLLEDLERELDEPGHQVSTPPNEQKPVWEKISSSGTAKESPSSMQPQPLETSHKYESWGPLYIQESGEEQEFAQDPRKVRDCRLSTQHEESADEQKGSEAEGLKGDIISVIIANKPEASLERQCVNLENEKGTKPPLQEAGSKKGRESVPTKPTPGERRYICAECGKAFSNSSNLTKHRRTHTGEKPYVCTKCGKAFSHSSNLTLHYRTHLVDRPYDCKCGKAFGQSSDLLKHQRMHTEEAPYQCKDCGKAFSGKGSLIRHYRIHTGEKPYQCNECGKSFSQHAGLSSHQRLHTGEKPYKCKECGKAFNHSSNFNKHHRIHTGEKPYWCHHCGKTFCSKSNLSKHQRVHTGEGEAP

SEQ ID NO: 2326 - protein, 2263 aa, Homo sapiens
GNMACWPQLRLLLWKNLTFRRRQTCQLLLEVAWPLFIFLILISVRLSYPPYEQHECHFPNKAMPSAGTLPWVQGIICNANNPCFRYPTPGEAPGVVGNFNKSIVARLFSDARRLLLYSQKDTSMKDMRKVLRTLQQIKKSSSNLKLQDFLVDNETFSGFLYHNLSLPKSTVDKMLRADVILHKVFLQGYQLHLTSLCNGSKSEEMIQLGDQEVSELCGLPREKLAAAERVLRSNMDILKPILRTLNSTSPFPSKELAEATKTLLHSLGTLAQELFSMRSWSDMRQEVMFLTNVNSSSSSTQIYQAVSRIVCGHPEGGGLKIKSLNWYEDNNYKALFGGNGTEEDAETFYDNSTTPYCNDLMKNLESSPLSRIIWKALKPLLVGKILYTPDTPATRQVMAEVNKTFQELAVFHDLEGMWEELSPKIWTFMENSQEMDLVRMLLDSRDNDHFWEQQLDGLDWTAQDIVAFLAKHPEDVQSSNGSVYTWREAFNETNQAIRTISRFMECVNLNKLEPIATEVWLINKSMELLDERKFWAGIVFTGITPGSIELPHHVKYKIRMGIDNVERTNKIKDGYWDPGPRADPFEDMRYVWGGFAYLQDVVEQAIIRVLTGTEKKTGVYMQQMPYPCYVDDIFLRVMSRSMPLFMTLAWIYSVAVIIKGIVYEKEARLKETMRIMGLDNSILWFSWFISSLIPLLVSAGLLVVILKLGNLLPYSDPSVVFVFLSVFAVVTILQCFLISTLFSRANLAAACGGIIYFTLYLPYVLCVAWQDYVGFTLKIFASLLSPVAFGFGCEYFALFEEQGIGVQWDNLFESPVEEDGFNLTTSVSMMLFDTFLYGVMTWYIEAVFPGQYGIPRPWYFPCTKSYWFGEESDEKSHPGSNQKRISEICMEEEPTHLKLGVSIQNLVKVYRDGMKVAVDGLALNFYEGQITSFLGHNGAGKTTTMSILTGLFPPTSGTAYILGKDIRSEMSTIRQNLGVCPQHNVLFDMLTVEEHIWFYARLKGLSEKHVKAEMEQMALDVGLPSSKLKSKTSQLSGGMQRKLSVALAFVGGSKVVILDEPTAGVDPYSRRGIWELLLKYRQGRTIILSTHHMDEADVLGDRIAIISHGKLCCVGSSLFLKNQLGTGYYLTLVKKDVESSLSSCRNSSSTVSYLKKEDSVSQSSSDAGLGSDHESDTLTIDVSAISNLIRKHVSEARLVEDIGHELTYVLPYEAAKEGAFVELFHEIDDRLSDLGISSYGISETTLEEIFLKVAEESGVDAETSDGTLPARRNRRAFGDKQSCLRPFTEDDAADPNDSDIDPESRETDLLSGMDGKGSYQVKGWKLTQQQFVALLWKRLLIARRSRKGFFAQIVLPAVFVCIALVFSLIVPPFGKYPSLELQPWMYNEQYTFVSNDAPEDTGTLELLNALTKDPGFGTRCMEGNPIPDTPCQAGEEEWTTAPVPQTIMDLFQNGNWTMQNPSPACQCSSDKIKKMLPVCPPGAGGLPPPQRKQNTADILQDLTGRNISDYLVKTYVQIIAKSLKNKIWVNEFRYGGFSLGVSNTQALPPSQEVNDATKQMKKHLKLAKDSSADRFLNSLGRFMTGLDTRNNVKVWFNNKGWHAISSFLNVINNAILRANLQKGENPSHYGITAFNHPLNLTKQQLSEVAPMTTSVDVLVSICVIFAMSFVPASFVVFLIQERVSKAKHLQFISGVKPVIYWLSNFVWDMCNYVVPATLVIIIFICFQQKSYVSSTNLPVLALLLLLYGWSITPLMYPASFVFKIPSTAYVVLTSVNLFIGINGSVATFVLELFTDNKLNNINDILKSVFLIFPHFCLGRGLIDMVKNQAMADALERFGENRFVSPLSWDLVGRNLFAMAVEGVVFFLITVLIQYRFFIRPRPVNAKLSPLNDEDEDVRRERQRILDGGGQNDILEIKELTKIYRRKRKPAVDRICVGIPPGECFGLLGVNGAGKSSTFKMLTGDTTVTRGDAFLNRNSILSNIHEVHQNMGYCPQFDAITELLTGREHVEFFALLRGVPEKEVGKVGEWAIRKLGLVKYGEKYAGNYSGGNKRKLSTAMALIGGPPVVFLDEPTTGMDPKARRFLWNCALSVVKEGRSVVLTSHSMEECEALCTRMAIMVNGRFRCLGSVQHLKNRFGDGYTIVVRIAGSNPDLKPVQDFFGLAFPGSVPKEKHRNMLQYQLPSSLSSLARIFSILSQSKKRLHIEDYSVSQTTLDQVFVNFAKDQSDDDHLKDLSLHKNQTVVDVAVLTSFLQDEKVKESYV

SEQ ID NO: 2327 - protein, 521 aa, Homo sapiens
IPGSTISFSLCFIFPPCVPTMVRKPVVSTISKGGYLQGNVNGRLPSLGNKEPPGQEKVQLKRKVTLLRGVSIIIGTIIGAGIFISPKGVLQNTGSVGMSLTIWTVCGVLSLFGALSYAELGTTIKKSGGHYTYILEVFGPLPAFVRVWVELLIIRPAATAVISLAFGRYILEPFFIQCEIPELAIKLITAVGITVVMVLNSMSVSWSARIQIFLTFCKLTAILIIIVPGVMQLIKGQTQNFKDAFSGRDSSITRLPLAFYYGMYAYAGWFYLNFVTEEVENPEKTIPLAICISMAIVTIGYVLTNVAYFTTINAEELLLSNAVAVTFSERLLGNFSLAVPIFVALSCFGSMNGGVFAVSRLFYVASREGHLPEILSMIHVRKHTPLPAVIVLHPLTMIMLFSGDLDSLLNFLSFARWLFIGLAVAGLIYLRYKCPDMHRPFKVPLFIPALFSFTCLFMVALSLYSDPFSTGIGFVITLTGVPAYYLFIIWDKKPRWFRIMSEKITRTLQIILEVVPEEDKL

SEQ ID NO: 2328 - protein, 721 aa, Homo sapiens
RGGSLRCVLGKLLGQLLCFQSERCVRFPEGLLRHRGCGLLSSRLSAGKPPLRTSFFGSWGVLPPLADAASMSGVRAVRISIESACEKQVHEVGLDGTETYLPPLSMSQNLARLAQRIDFSQGSGSEEEEAAGTEGDAQEWPGAGSSADQDDEEGVVKFQPSLWPWDSVRNNLRSALTEMCVLYDVLSIVRDKKFMTLDPVSQDALPPKQNPQTLQLISKKKSLAGAAQILLKGAERLTKSVTENQENKLQRDFNSELLRLRQHWKLRKVGDKILGDLSYRSAGSLFPHHGTFEVIKNTDLDLDKKIPEDYCPLDVQIPSDLEGSAYIKVSIQKQAPDIGDLGTVNLFKRPLPKSKPGSPHWQTKLEAAQNVLLCKEIFAQLSREAVQIKSQVPHIVVKNQIISQPFPSLQLSISLCHSSNDKKSQKFATEKQCPEDHLYVLEHNLHLLIREFHKQTLSSIMMPHPASAPFGHKRMRLSGPQAFDKNEINSLQSSEGLLEKIIKQAKHIFLRSRAAATIDSLASRIEDPQIQAHWSNINDVYESSVKVLITSQGYEQICKSIQLQLNIGVEQIRVVHRDGRVITLSYQEQELQDFLLSQMSQHQVHAVQQLAKVMGWQVLSFSNHVGLGPIESIGNASAITVASPSGDYAISVRNGPESGSKIMVQFPRNQCKDLPKSDVLQDNKWSHLRGPFKEVQWNKMEGRNFVYKMELLMSALSPCLL

SEQ ID NO: 2329 - protein, 350 aa, Homo sapiens
FVWNPRGGRKRRRQAAVTQAATRASGTPSPRDGTMTQGKLSVANKAPGTEGQQQVHGEKKEAPAVPSAPPSYEEATSGEGMKAGAFPPAPTAVPLHPSWAYVDPSSSSSYDNGFPTGDHELFTTFSWDDQKVRRVFVRKVYTILLIQLLVTLAVVALFTFCDPVKDYVQANPGWYWASYAVFFATYLTLACCSGPRRHFPWNLILLTVFTLSMAYLTGMLSSYYNTTSVLLCLGITALVCLSVTVFSFQTKFDFTSCQGVLFVLLMTLFFSGLILAILLPFQYVPWLHAVYAALGAGVFTLFLALDTQLLMGNRRHSLSPEEYIFGALNIYLDIIYIFTFFLQLFGTNRE

SEQ ID NO: 2330 - protein, 266 aa, Homo sapiens
ASQLPDYSISPPSLPPRISFHPSPTLARVAMAEPSEATQSHSISSSSFGAEPSAPGGGGSPGACPALGTKSCSSSCAVHDLIFWRDVKKTGFVFGTTLIMLLSLAAFSVISVVSYLILALLSVTISFRIYKSVIQAVQKSEEGHPFKAYLDVDITLSSEAFHNYMNAAMVHINRALKLIIRLFLVEDLVDSLKLAVFMWLMTYVGAVFNGITLLILAELLIFSVPIVYEKYKTQIDHYVGIARDQTKSIVEKIQAKLPGIAKKKAE

SEQ ID NO: 2331 - protein, 383 aa, Homo sapiens
TRMSRHEGVSCDACLKGNFRGRRYKCLICYDYDLCASCYESGATTTRHTTDHPMQCILTRVDFDLYYGGEAFSVEQPQSFTCPYCGKMGYTETSLQEHVTSEHAETSTEVICPICAALPGGDPNHVTDDFAAHLTLEHRAPRDLDESSGVRHVRRMFHPGRGLGGPRARRSNMHFTSSSTGGLSSSQSSYSPSNREAMDPIAELLSQLSGVRRSAGGQLNSSGPSASQLQQLQMQLQLERQHAQAARQQLETARNATRRTNTSSVTTTITQSTATTNIANTESSQQTLQNSQFLLTRLNDPKMSETERQSMESERADRSLFVQELLLSTLVREESSSSDEDDRGEMADFGAMGCVDIMPLDVALENLNLKESNKGNEPPPPPL

SEQ ID NO: 2332 - protein, 334 aa, Homo sapiens
GSTHASADAWAQWFCTEALVMGAPVWYLVAAALLVGFILFLTRSRGRAASAGQEPLHNEELAGAGRVAQPGPLEPEEPRAGGRPRRRRDLGSRLQAQRRAQRVAWAEADENEEEAVILAQEEEGVEKPAETHLSGKIGAKKLRKLEEKQARKAQREAEEAEREERKRLESQREAEWKKEEERLRLEEEQKEEEERKAREEQAQREHEEYLKLKEAFVVEEEGVGETMTEEQSQSFLTEFINYIKQSKVVLLEDLASQVGLRTQDTINRIQDLLAEGTITGVIDDRGKFIYITPEELAAVANFIRQRGRVSIAELAQASNSLIAWGRESPAQAPA

SEQ ID NO: 2333 - protein, 392 aa, Homo sapiens
RRRWRARGGLVPTLAWAEATGAYVPGRDKPDLPTWKRNFRSALNRKEGLRLAEDRSKDPHDPHKIYEFVNSGVGDFSQPDTSPDTNGGGSTSDTQEDILDELLGNMVLAPLPDPGPPSLAVAPEPCPQPLRSPSLDNPTPFPNLGPSENPLKRLLVPGEEWEFEVTAFYRGRQVFQQTISCPEGLRLVGSEVGDRTLPGWPVTLPDPGMSLTDRGVMSYVRHVLSCLGGGLALWRAGQWLWAQRLGHCHTYWAVSEELLPNSGHGPDGEVPKDKEGGVFDLGPFIVGSLGPPDLITFTEGSGRSPRYALWFCVGESWPQDQPWTKRLVMVKVVPTCLRALVEMARVGGASSLENTVDLHISNSHPLSLTSDQYKAYLQDLVEGMDFQGPGES

SEQ ID NO: 2334 - protein, 414 aa, Homo sapiens
ANMAPVEHVVADAGAFLRHAALQDIGKNIYTIREVVTEIRDKATRRRLAVLPYELRFKEPLPEYVRLVTEFSKKTGDYPSLSATDIQVLALTYQLEAEFVGVSHLKQEPQKVKVSSSIQHPETPLHISGFHLPYKPKPPQETEKGHSACEPENLEFSSFMFWRNPLPNIDHELQELLIDRGEDVPSEEEEEEENGFEDRKDDSDDDGGGWITPSNIKQIQQELEQCDVPEDVRVGCLTTDFAMQNVLLQMGLHVLAVNGMLIREARSYILRCHGCFKTTSDMSRVFCSHCGNKTLKKVSVTVSDDGTLHMHFSRNPKVLNPRGLRYSLPTPKGGKYAINPHLTEDQRFPQLRLSQKARQKTNVFAPDYIAGVSPFVENDISSRSATLQVRDSTLGAGRRRLNPNASRKKFVKKR

SEQ ID NO: 2335 - protein, 59 aa, Homo sapiens
RRNNIRQFIMKVCISGQARWLTPVVPVLWETEAGRSLELKSLRPAWATWGNPISTKINK

SEQ ID NO: 2336 - protein, 361 aa, Homo sapiens
KMNPTDIADTTLDESIYSNYYLYESIPKPCTKEGIKAFGELFLPPLYSLVFVFGLLGNSVVVLVLFKYKRLRSMTDVYLLNLAISDLLFVFSLPFWGYYAADQWVFGLGLCKMISWMYLVGFYSGIFFVMLMSIDRYLAIVHAVFSLRARTLTYGVITSLATWSVAVFASLPGFLFSTCYTERNHTYCKTKYSLNSTTWKVLSSLEINILGLVIPLGIMLFCYSMIIRTLQHCKNEKKNKAVKMIFAVVVLFLGFWTPYNIVLFLETLVELEVLQDCTFERYLDYAIQATETLAFVHCCLNPIIYFFLGEKFRKYILQLFKTCRGLFVLCQYCGLLQIYSADTPSSSYTQSTMDHDLHDAL

SEQ ID NO: 2337 - protein, 155 aa, Homo sapiens
SLSAMRFLAATFLLLALSTAAQAEPVQFKDCGSVDGVIKEVNVSPCPTQPCQLSKGQSYSVNVTFTSNIQSKSSKAVVHGILMGVPVPFPIPEPDGCKSGINCPIQKDKTYSYLNKLPVKSEYPSIKLVVEWQLQDDKNQSLFCWEIPVQIVSHL

SEQ ID NO: 2338 - protein, 294 aa, Homo sapiens
VIKMALAARLLPQFLHSRSLPCGAVRLRTPAVAEVRLPSATLCYFCRCRLGLGAALFPRSARALAASALPAQGSRWPVLSSPGLPAAFASFPACPQRSYSTEEKPQQHQKTKMIVLGFSNPINWVRTRIKAFLIWAYFDKEFSITEFSEGAKQAFAHVSKLLSQCKFDLLEELVAKEVLHALKEKVTSLPDNHKNALAANIDEIVFTSTGDISIYYDEKGRKFVNILMCFWYLTSANIPSETLRGASVFQVKLGNQNVETKQLLSASYEFQREFTQGVKPDWTIARIEHSKLLE

SEQ ID NO: 2339 - protein, 39 aa, Homo sapiens
MSGFIHQLLIQNLFCVYHTRLKTSQGLCLLSLKSLHPMS

SEQ ID NO: 2340 - protein, 301 aa, Homo sapiens
ASPFLRPQGHDSGEREPFSQTPGLMQPFSIPVQITLQGSRRRQGRTAFPASGKKRETDYSDGDPLDVHKRLPSSTGEDRAVMLGFAMMGFSVLMFFLLGTTILKPFMLSIQREESTCTAIHTDIMDDWLDCAFTCGVHCHGQGKYPCLQVFVNLSHPGQKALLHYNEEAVQINPKCFYTPKCHQDRNDLLNSALDIKEFFDHKNGTPFSCFYSPASQSEDVILIKKYDQMAIFHCLFWPSLTLLGGALIVGMVRLTQHLSLLCEKYSTVVRDEVGGKVPYIEQHQFKLCIMRRSKGRAEKS

SEQ ID NO: 2341 - protein, 303 aa, Homo sapiens
SSVVEFSALSVSMACLSPSQLQKFQQDGFLVLEGFLSAEECVAMQQRIGEIVAEMDVPLHCRTEFSTQEEEQLRAQGSTDYFLSSGDKIRFFFEKGVFDEKGNFLVPPEKSINKIGHALHAHDPVFKSITHSFKVQTLARSLGLQMPVVVQSMYIFKQPHFGGEVSPHQDASFLYTEPLGRVLGVWIAVEDATLENGCLWFIPGSHTSGVSRRMVRAPVGSAPGTSFLGSEPARDNSLFVPTPVQRGALVLIHGEVVHKSKQNLSDRSRQAYTFHLMEASGTTWSPENWLQPTAELPFPQLYT

SEQ ID NO: 2342 - protein, 301 aa, Homo sapiens
MALSGNCSRYYPREQGSAVPNSFPEVVELNVGGQVYFTRHSTLISIPHSLLWKMFSPKRDTANDLAKDSKGRFFIDRDGFLFRYILDYLRDRQVVLPDHFPEKGRLKREAEYFQLPDLVKLLTPDEIKQSPDEFCHSDFEDASQGSDTRICPPSSLLPADRKWGFITVGYRGSCTLGREGQADAKFRRVPRILVCGRISLAKEVFGETLNESRDPDRAPERYTSRFYLKFKHLMGAPASNFILGFWGLGQNQDKHPVNIYLQQRSVIRPDLTSKKAGDLKGKGDAQEVSRRRRWLGDPEHL

SEQ ID NO: 2343 - protein, 931 aa, Homo sapiens
MRMQRHKNDTMDFGDSGKRIGGGVLCLLHQSNTSFIKLNNNGFEDIVIVIDPSVPEDEKIIEQIEDMVTTASTYLFEATEKRFFFKNVSILIPENWKENPQYKRPKHENHKHADVIVAPPTLPGRDEPYTKQFTECGEKGEYIHFTPDLLLGKKQNEYGPPGKLFVHEWAHLRWGVFDEYNEDQPFYRAKSKKIEATRCSAGISGRNRVYKCQGGSCLSRACRIDSTTKLYGKDCQFFPDKVQTEKASIMFMQSIDSVVEFCNEKTHNQEAPSLQNIKCNFRSTWEVISNSEDFKNTIPMVTPPPPPVFSLLKIRQRIVCLVLDKSGSMGGKDRLNRMNQAAKHFLLQTVENGSWVGMVHFDSTATIVNKLIQIKSSDERNTLMAGLPTYPLGGTSICSGIKYAFQVIGELHSQLDGSEVLLLTDGEDNTASSCIDEVKQSGAIVHFIALGRAADEAVIEMSKITGGSHFYVSDEAQNNGLIDAFGALTSGNTDLSQKSLQLESKGLTLNSNAWMNDTVIIDSTVGKDTFFLITWNSLPPSISLWDPSGTIMENFTVDATSKMAYLSIPGTAKVGTWAYNLQAKANPETLTITVTSRAANSSVPPITVNAKMNKDVNSFPSPMIVYAEILQGYVPVLGANVTAFIESQNGHTEVLELLDNGAGADSFKNDGVYSRYFTAYTENGRYSLKVRAHGGANTARLKLRPPLNRAAYIPGWVVNGEIEANPPRPEIDEDTQTTLEDFSRTASGGAFVVSQVPSLPLPDQYPPSQITDLDATVHEDKIILTWTAPGDNFDVGKVQRYIIRISASILDLRDSFDDALQVNTTDLSPKEANSKESFAFKPENISEENATHIFIAIKSIDKSNLTSKVSNIAQVTLFIPQANPDDIDPTPTPTPTPTPDKSHNSGVNISTLVLSVIGSVVIVNFILSTTI

SEQ ID NO: 2344 - protein, 137 aa, Homo sapiens
INSSPRTGRDHQELNLHTERDSRSQRAVLKIPRQNPGIFYWIFLPSRSHSASHGSRQRQVSCQGTQDEILKMRNTFAELKNSLEALSSRMDQAEERIGTQAGVQWRDHGSLQPQPPEFKQCFHLSLPSSWDYRACLS

SEQ ID NO: 2345 - protein, 1076 aa, Homo sapiens
AWRKSSVVPPRGTRRGEKSDQDKSGQKNKRDFLSMKQSPALAPEERCRRAGSPKPVLRADDNNMGNGCSQKLATANLLRFLLLVLIPCICALVLLLEILLSYVGTLQKVYFKSNGSEPLVTDGEIQGSDVILTNTIYNQSTVVSTAHPDQHVPAWTTDASLPGDQSHRNTSACMNITHSQCQMLPYHATLTPLLSVVRNMEMEKFLKFFTYLHRLSCYQHIMLFGCTLAFPECIIDGDDSHGLLPCRSFCEAAKEGCESVLGMVNYSWPDFLRCSQFRNQTESSNVSRICFSPQQENGKQLLCGRGENFLCASGICIPGKLQCNGYNDCDDWSDEAHCNCSENLFHCHTGKCLNYSLVCDGYDDCGDLSDEQNCDCNPTTEHRCGDGRCIAMEWVCDGDHDCVDKSDEVNCSCHSQGLVECRNGQCIPSTFQCDGDEDCKDGSDEENCSVIQTSCQEGDQRCLYNPCLDSCGGSSLCDPNNSLNNCSQCEPITLELCMNLPYNSTSYPNYFGHRTQKEASISWESSLFPALVQTNCYKYLMFFSCTILVPKCDVNTGEHIPPCRALCEHSKERCESVLGIVGLQWPEDTDCSQFPEENSDNQTCLMPDEYVEECSPSHFKCRSGQCVLASRRCDGQADCDDDSDEENCGCKERDLWECPSNKQCLKHTVICDGFPDCPDYMDEKNCSFCQDDELECANHACVSRDLWCDGEADCSDSSDEWDCVTLSINVNSSSFLMVHRAATEHHVCADGWQEILSQLACKQMGLGEPSVTKLIQEQEKEPRWLTLHSNWESLNGTTLHELLVNGQSCESRSKISLLCTKQDCGRRPAARMNKRILGGRTSRPGRWPWQCSLQSEPSGHICGCVLIAKKWVLTVAHCFEGRENAAVWKVVLGINNLDHPSVFMQTRFVKTIILHPRYSRAVVDYDISIVELSEDISETGYVRPVCLPNPEQWLEPDTYCYITGWGHMGNKMPFKLQEGEVRIISLEHCQSYFDMKTITTRMICAGYESGTVDSCMGDSGGPLVCEKPGGRWTLFGLTSWGSVCFSKVLGPGVYSNVSYFVEWIKRQIYIQTFLLN

SEQ ID NO: 2346 - protein, 962 aa, Homo sapiens
KVILSSEMSKTNKSKSGSRSSRSRSASRSRSRSFSKSRSRSRSLSRSRKRRLSSRSRSRSYSPAHNRERNHPRVYQNRDFRGHNRGYRRPYYFRGRNRGFYPWGQYNRGGYGNYRSNWQNYRQAYSPRRGRSRSRSPKRRSPSPRSRSHSRNSDKSSSDRSRRSSSSRSSSNHSRVESSKRKSAKEKKSSSKDSRPSQAAGDNQGDEVKEQTFSGGTSQDTKASESSKPWPDATYGTGSASRASAVSELSPRERSPALKSPLQSVVVRRRSPRPSPVPKPSPPLSSTSQMGSTLPSGAGYQSGTHQGQFDHGSGSLSPSKKSPVGKSPPSTGSTYGSSQKEESAASGGAAYTKRYLEEQKTENGKDKEQKQTNTDKEKIKEKGSFSDTGLGDGKMKSDSFAPKTDSEKPFRGSQSPKRYKLRDDFEKKMADFHKEEMDDQDKDKAKGRKESEFDDEPKFMSKVIGANKNQEEEKSGKWEGLVYAPPGKEKQRKTEELEEESFPERSKKEDRGKRSEGGHRGFVPEKNFRVTAYKAVQEKSSSPPPRKTSESRDKLGAKGDFPTGKSSFSITREAQVNVRMDSFDEDLARPSGLLAQERKLCRDLVHSNKKEQEFRSIFQHIQSAQSQRSPSELFAQHIVTIVHHVKEHHFGSSGMTLHERFTKYLKRGTEQEAAKNKKSPEIHRRIDISPSTFRKHGLAHDEMKSPREPGYKAEGKYKDDPVDLRLDIERRKKHKERDLKRGKSRESVDSRDSSHSRERSAEKTEKTHKGSKKQKKHRRARDRSRSSSSSSQSSHSYKAEEYTEETEEREESTTGFDKSRLGTKDFVGPSERGGGRARGTFQFRARGRGWGRGNYSGNNNNNSNNDFQKRNREEEWDPEYTPKSKKYYLHDDREGEGSDKWVSRGRGRGAFPRGRGRFMFRKSSTSPKWAHDKFSGEEGEIEDDESGTENREEKDNIQPTTE

SEQ ID NO: 2347 - protein, 117 aa, Homo sapiens
CPALGGRQDLQGTRLLWAHDSGVGGQKAKSKQENLESLEATGREEEGGQGPPVTTKGVLLALLMAGLALQPGTALLCYSCKAQVSNEDCLQVENCTQLGEQCWTARIREWGDDSRQA

SEQ ID NO: 2348 - protein, 132 aa, Homo sapiens
NPPSACTPGSCDSCSGRGRDLAFDSVWSTNNMSDPRRPNKVLRYKPPPSECNPALDDPTPDYMNLLGMIFSMCGLMLKLKWCAWVAVYCSFISFANSRSSEDTKQMMSSFMLSISAVVMSYLQNPQPMTPPW

SEQ ID NO: 2349 - protein, 344 aa, Homo sapiens
ASASHITSGHLRCFPGSEGVGTMARCFSLVLLLTSIWTTRLLVQGSLRAEELSIQVSCRIMGITLVSKKANQQLNFTEAKEACRLLGLSLAGKDQVETALKASFETCSYGWVGDGFVVISRISPNPKCGKNGVGVLIWKVPVSRQFAAYCYNSSDTWTNSCIPEIITTKDPIFNTQTATQTTEFIVSDSTYSVASPYSTIPAPTTTPPAPASTSIPRRKKLICVTEVFMETSTMSTETEPFVENKAAFKNEAAGFGGVPTALLVLALLFFGAAAGLGFCYVKRYVKAFPFTNKNQQKEMIETKVVKEEKANDSNPNEESKKTDKNPEESKSPSKTTMRCLEAEV

SEQ ID NO: 2350 - protein, 258 aa, Homo sapiens
KERCQFVVKPMLSTVGSFLQDLQNEDKGIKTAAIFTADGNMISASTLMDILLMNDFKLVINKIAYDVQCPKREKPSNEHTAEMEHMKSLVHRLFTILHLEESQKKREHHLLEKIDHLKEQLQPLEQVKAGIEAHSEAKTSGLLWAGLALLSIQGGALAWLTWWVYSWDIMEPVTYFITFANSMVFFAYFIVTRQDYTYSAVKSRQFLQFFHKKSKQQHFDVQQYNKLKEDLAKAKESLKQARHSLCLQMQVEELNEKN

SEQ ID NO: 2351 - protein, 378 aa, Homo sapiens
VGFWERPLRSSRWFRRSLRRWEMLARAARGTGALLLRGSLLASGRAPRRASSGLPRNTVVLFVPQQEAWVVERMGRFHRILEPGLNILIPVLDRIRYVQSLKEIVINVPEQSAVTLDNVTLQIDGVLYLRIMDPYKASYGVEDPEYAVTQLAQTTMRSELGKLSLDKVFRERESLNASIVDAINQAADCWGIRCLRYEIKDIHVPPRVKESMQMQVEAERRKRATVLESEGTRESAINVAEGKKQAQILASEAEKAEQINQAAGEASAVLAKAKAKAEAIRILAAALTQHNGDAAASLTVAEQYVSAFSKLAKDSNTILLPSNPGDVTSMVAQAMGVYGALTKAPVPGTPDSLSSGSSRDVQGTDASLDEELDRVKMS

SEQ ID NO: 2352 - protein, 269 aa, Homo sapiens
NRENLLESRMMDPCSVGVQLRTTNECHKTYYTRHTGFKTLQELSSNDMLLLQLRTGMTLSGNNTICFHHVKIYIDRFEDLQKSCCDPFNIHKKLAKKNLHVIDLDDATFLSAKFGRQLVPGWKLCPKCTQIINGSVDVDTEDRQKRKPESDGRTAKALRSLQFTNPGRQTEFAPETGKREKRRLTKNATAGSDRQVIPAKSKVYDSQGLLIFSGMDLCDCLDEDCLGCFYACPACGSTKCGAECRCDRKWLYEQIEIEGGEIIHNKHAG

SEQ ID NO: 2353 - protein, 470 aa, Homo sapiens
TEWGLSGSCPGCSPLEPGSRGRGAAAWRILRCRRLPEPSPFLTQPNLAQSQPPAPVPVTDPSVTMHPAVFLSLPDLRCSLLLLVTWVFTPVTTEITSLDTENIDEILNNADVALVNFYADWCRFSQMLHPIFEEASDVIKEEFPNENQVVFARVDCDQHSDIAQRYRISKYPTLKLFRNGMMMKREYRGQRSVKALADYIRQQKSDPIQEIRDLAEITTLDRSKRNIIGYFEQKDSDNYRVFERVANILHDDCAFLSAFGDVSKPERYSGDNIIYKPPGHSAPDMVYLGAMTNFDVTYNWIQDKCVPLVREITFENGEELTEEGLPFLILFHMKEDTESLEIFQNEVARQLISEKGTINFLHADCDKFRHPLLHIQKTPADCPVIAIDSFRHMYVFGDFKDVLIPGKLKQFVFDLHSGKLHREFHHGPDPTDTAPGEQAQDVASSPPESSFQKLAPSEYRYTLLRDRDEL

SEQ ID NO: 2354 - protein, 174 aa, Homo sapiens
GLSRKLRAGFLPGFCRVSPCGSWVVETLVKMACAAARSPADQDRFICIYPAYLNNKKTIAEGRRIPISKAVENPTATEIQDVCSAVGLNVFLEKNKMYSREWNRDVQYRGRVRVQLKQEDGSLCLVQFPSRKSVMLYAAEMIPKLKTRTQKTGGADQSLQQGEGSKKGKGKKKK

SEQ ID NO: 2355 - protein, 146 aa, Homo sapiens
QSHETKMQSGTHWRVLGLCLLSVGVWGQDGNEEMGGITQTPYKVSISGTTVILTCPQYPGSEILWQHNDKNIGGDEDDKNIGSDEDHLSLKEFSELEQSGYYVCYPRGSKPEDANFYLYLRARGNPGLQNRYHRLFREDHSKGHSQ

SEQ ID NO: 2356 - protein, 101 aa, Homo sapiens
AVQRIRHEMNIFRLTGDLSHLAAIVILLLKIWKTRSCAGISGKSQLLFALVFTTRYLDLFTSFISLYNTSMKVWYAIHRNVFHLQCTGLWTLNLCQLCIFN

SEQ ID NO: 2357 - protein, 170 aa, Homo sapiens
GAGAGGDWAAMDKLKKVLSGQDTEDRSGLSEVVEASSLSWSTRIKGFIACFAIGILCSLLGTVLLWVPRKGLHLFAVFYTFGNIASIGSTIFLMGPVKQLKRMFEPTRLIATIMVLLCFALTLCSAFWWHNKGLALIFCILQSLALTWYSLSFIPFARDAVKKCFAVCLA

SEQ ID NO: 2358 - protein, 112 aa, Homo sapiens
AQDIRSVHSLGQKSTFVKHFRTLSHLHGLPDPPPHWPPQERSPPSHPCMPSHRPQIPQLSNSGPSDPRWGCVGPSMPTSTCLPGAVEASTTKASLPKCPVDSSLPTPEACFL

SEQ ID NO: 2359 - protein, 273 aa, Homo sapiens
ETRVKTSLELLRTQLEPTGTVGNTIMTSQPVPNETIIVLPSNVINFSQAEKPEPTNQGQDSLKKHLHAEIKVIGTIQILCGMMVLSLGIILASASFSPNFTQVTSTLLNSAYPFIGPFFFIISGSLSIATEKRLTKLLVHSSLVGSILSALSALVGFIILSVKQATLNPASLQCELDKNNIPTRSYVSYFYHDSLYTTDCYTAKASLAGTLSLMLICTLLEFCLAVLTAVLRWKQAYSDFPGSVLFLPHSYIGNSGMSSKMTHDCGYEELLTS

SEQ ID NO: 2360 - protein, 157 aa, Homo sapiens
KYRYRRPYPVMRKICQVGPAGLAFILNISPVAHRVALCHLAGCQEQAAWYHTLQILFFLVSAYFFSCPVPEKYFPGSCDIVGHGHQIFHAFLSICTLSQLEAILLDYQGRQEIFLQRHGPLSVHMACLSFFFLAACSAATAALLRHKVKARLTKKDS

SEQ ID NO: 2361 - protein, 134 aa, Homo sapiens
TELSQLEKAHPPADMGRRKSKRKPPPKKKMTGTLETQFTCPFCNHEKSCDVKMDRARNTGVISCTVCLEEFQTPITCILGNLGFFQRVGRGLESGPCSSGPLCALVQGQSRPEEQVPPSDFCGVRRCRAGFQCQ

SEQ ID NO: 2362 - protein, 386 aa, Homo sapiens
RTSTQKWQSVFNDSQEHLERFYCNPENDRMRMKYGGQEFWADLNAMNVYETTEFDQLRRLSTPPSSNVNSIYHTVWKFFCRDHFGWREYPESVIRLIEEANSRGLKEVRFMMWNNHYILHNSFFRREIKRRPLFRSCFILLPYLQTLGGVPTQAPPPLEATSSSQIICPDGVTSANFYPETWVYMHPSQDFIQVPVSAEDKSYRIIYNLFHKTVPEFKYRILQILRVQNQFLWEKYKRKKEYMNRKMFGRDRIINERHLFHGTSQDVVDGICKHNFDPRVCGKHATMFGQGSYFAKKASYSHNFSKKSSKGVHFMFLAKVLTGRYTMGSHGMRRPPPVNPGSVTSDLYDSCVDNFFEPQIFVIFNDDQSYPYFVIQYEEVSNTVSI

SEQ ID NO: 2363 - protein, 171 aa, Homo sapiens
IENCRTRLRQAWHEVCGNKMAAPIPQGFSCLSRFLGWWFRQPVLVTQSAAIVPVRTKKRFTPPIYQPKFKTEKEFMQHARKAGLVIPPEKSDRSIHLACTAGIFDAYVPPEGDARISSLSKEGLIERTERMKKTMASQVSIRRIKDYDANFKIKDFPEKAKDIFIEGSPLY

SEQ ID NO: 2364 - protein, 115 aa, Homo sapiens
YIRTGYVYICIIYAQLMYTYYIRTAYVYICILYAQLMYTYVLYTHSLCIHMYSIRTAYVYICIIYAQIMYTYVFYTHRLCIHMYSIRTDYVYICILYAQLMYTYVFYTHSYMSDE

SEQ ID NO: 2365 - protein, 728 aa, Homo sapiens
NSSEHFSQAPQRLSFYSWYGSARLFRFRVPPDAVLLRWLLQVSRESGAACTDAEITVHFRSGAPPVINPLGTSFPDDTAVQPSFQVGVPLSTTPRSNASVNVSHPAPGDWFVAAHLPPSSQKIELKGLAPTCAYVFQPELLVTRVVEISIMEPDVPLPQTLLSHPSYLKVFVPDYTRELLLELRDCVSNGSLGCPVRLTVGPVTLPSNFQKVLTCTGAPWPCRLLLPSPPWDRWLQVTAESLVGPLGTVAFSAVAALTACRPRSVTIQPLLQSSQNQSFNASSGLLSPSPDHQDLGRSGRVDRSPFCLTNYPVTREDMDVVSVHFQPLDRVSVRVCSDTPSVMRLRLNTGMDSGGSLTISLRANKTEMRNETVVVACVNAASPFLGFNTSLNCTTAFFQGYPLSLSAWSRRANLIIPYPETDNWYLSLQLMCPENAEDCEQAVVHVETTLYLVPCLNDCGPYGQCLLLRRHSYLYASCSCKAGWRGWSCTDNSTAQTVAQQRAATLLLTLSNLMFLAPIAVSVRRFFLVEASVYAYTMFFSTFYHACDQPGEAVLCILSYDTLQYCDFLGSGAAIWVTILCMARLKTVLKYVLFLLGTLVIAMSLQLDRRGMWNMLGPCLFAFVIMASMWAYRCGHRRQCYPTSWQRWAFYLLPGVSMASVGIAIYTSMMTSDNYYYTHSIWHILLAGSAALLLPPPDQPAEPWACSQKFPCHYQICKNDREELYAVT

SEQ ID NO: 2366 - protein, 151 aa, Homo sapiens
KWYPSGPVRIPGRFYYKLPAGHRRCRMAPAKKGGEKKKGRSAINEVVTREYTINIHKRIHGVGFKKRAPRALKEIRKFAMKEMGTPDVRIDTRLNKAVWAKGIRNVPYRIRVRLSRKRNEDEDSPNKLYTLVTYVPVTTFKNLQTVNVDEN

SEQ ID NO: 2367 - protein, 380 aa, Homo sapiens
LERTPASADMAWTKYQLFLAGLMLVTGSINTLSAKWADNFMAEGCGGSKEHSFQHPFLQAVGMFLGEFSCLAAFYLLRCRAAGQSDSSVDPQQPFNPLLFLPPALCDMTGTSLMYVALNMTSASSFQMLRGAVIIFTGLFSVAFLGRRLVLSQWLGILATIAGLVVVGLADLLSKHDSQHKLSEVITGDLLIIMAQIIVAIQMVLEEKFVYKHNVHPLRAVGTEGLFGFVILSLLLVPMYYIPAGSFSGNPRGTLEDALDAFCQVGQQPLIAVALLGNISSIAFFNFAGISVTKELSATTRMVLDSLRTVVIWALSLALGWEAFHALQILGFLILLIGTALYNGLHRPLLGRLSRGRPLAEESEQERLLGGTRTPINDAS

SEQ ID NO: 2368 - protein, 123 aa, Homo sapiens
SPFWTEKRRMEKPLFPLVPLHWFGFGYTALVVSGGIVGYVKTGSVPSLAAGLLFGSLAGLGAYQLYQDPRNVWGFLAATSVTFVGVMGMRSYYYGKFMPVGLIAGASLLMAAKVGVRMLMTSD

SEQ ID NO: 2369 - protein, 595 aa, Homo sapiens
VSAAAVNMEPPDAPAQARGAPRLLLLAVLLAAHPDAQAEVRLSVPPLVEVMRGKSVILDCTPTGTHDHYMLEWFLTDRSGARPRLASAEMQGSELQVTMHDTRGRSPPYQLDSQGRLVLAEAQVGDERDYVCVVRAGAAGTAEAAARLNVFAKPEATEVSPNKGTLSVMEDSAQEIATSNSRNGNPAPKITWYRNGQRLEVPVEMNPEGYMTSRTVREASGLLSLTSTLYLRLRKDDRDASFHCAAHYSLPEGRHGRLDSPTFHLTLHYPTEHVQFWVGSPSTPAGWVREGDTVQLLCRGDGSPSPEYTLFRLQDEQEEVLNVNLEGNLTLEGVTRGQSGTYGCRVEDYDAADDVQLSKTLELRVAYLDPLELSEGKVLSLPLNSRAVVNCSVHGLPTPALRWTKDSTPLGDGPMLSLSSITFDSNGTYVCEASLPTVPVLSRTQNFTLLVQGSPELKTAEIEPKADGSWREGDEVTLICSARGHPDPKLSWSQLGGSPAEPIPGRQGWVSSSLTLKVTSALSRDGISCEASNPHGNKRHVFHFGTVSPQTSQAGVAVMAVAVSVGLLLLVVAVFYCVRRKGGPCCRQRREKGAP

SEQ ID NO: 2370 - protein, 399 aa, Homo sapiens
PRVRLLRPSRSRSCRGLLSTRAPGPSPFRSLHSSPLLPHAMKSPFYRCQNTTSVEKGNSAVMGGVLFSTGLLGNLLALGLLARSGLGWCSRRPLRPLPSVFYMLVCGLTVTDLLGKCLLSPVVLAAYAQNRSLRVLAPALDNSLCQAFAFFMSFFGLSSTLQLLAMALECWLSLGHPFFYRRHITLRLGALVAPVVSAFSLAFCALPFMGFGKFVQYCPGTWCFIQMVHEEGSLSVLGYSVLYSSLMALLVLATVLCNLGAMRNLYAMHRRLQRHPRSCTRDCAEPRADGREASPQPLEELDHLLLLALMTVLFTMCSLPVIYRAYYGAFKDVKEKNRTSEEAEDLRALRFLSVISIVDPWIFIIFRSPVFRIFFHKIFIRPLRYRSRCSNSTNMESSL

SEQ ID NO: 2371 - protein, 79 aa, Homo sapiens
RRGEIDMATEGDVELELETETSGPERPPEKPRKHDSGAADLERVTDYAEEKEIQSSNLETAMSVIGDRRSREQKAKQER

SEQ ID NO: 2372 - protein, 149 aa, Homo sapiens
RKERRRRRRRMEAVVFVFSLLDCCALIFLSVYFIITLSDLECDYINARSCCSKLNKWVIPELIGHTIVTVLLLMSLHWFIFLLNLPVATWNIYRYIMVPSGNMGVFDPTEIHNRGQLKSHMKEAMIKLGFHLLCFFMYLYSMILALIND

SEQ ID NO: 2373 - protein, 135 aa, Homo sapiens
RMMKCPQALLAIFWLLLSWVSSEDKVVQSPLSLVVHEGDTVTLNCSYEVTNFRSLLWYKQEKKAPTFLFMLTSSGIEKKSGRLSSILDKKELSSILNITATQTGDSAIYLCAVEAQCSLVTCSLYSNSTAEALQL

SEQ ID NO: 2374 - protein, 329 aa, Homo sapiens
GVRLRYSPIAVVMVGEAGRDLRRRRAVAVTAEKMAVLAPLIALVYSVPRLSRWLAQPYYLLSALLSAAFLLVRKLPPLCHGLPTQREDGNPCDFDWREVEILMFLSAIVMMKNRRSITVEQHIGNIFMFSKVANTILFFRLDIRMGLLYITLCIVFLMTCKPPLYMGPEYIKYFNDKTIDEELERDKRVTWIVEFFANWSNDCQSFAPIYADLSLKYNCTGLNFGKVDVGRYTDVSTRYKVSTSPLTKQLPTLILFQGGKEAMRRPQIDKKGRAVSWTFSEENVIREFNLNELYQRAKKLSKAGDNIPEEQPVASTPTTVSDGENKKDK

SEQ ID NO: 2375 - protein, 162 aa, Homo sapiens
TVSFHKTMASLKCSTVVCVICLEKPKYRCPACRVPYCSVVCFRKHKEQCNPETRPVEKKIRSALPTKTVKPVENKDDDDSIADFLNSDEEEDRVSLQNLKNLGESATLRSLLLNPHLRQLMVNLDQGEDKAKLMRAYMQEPLFVEFADCCLGIVEPSQNEES

SEQ ID NO: 2376 - protein, 161 aa, Homo sapiens
VGMELPAVNLKVILLGHWLLTTWGCIVFSGSYAWANFTILALGVWAVAQRDSIDAISMFLGGLLATIFLDIVHISIFYPRVSLTDTGRFGVGMAILSLLLKPLSCCFVYHMYRERGGELLVHTGFLGSSQDRSAYQTIDSAEAPADPFAVPEGRSQDARGY

SEQ ID NO: 2377 - protein, 113 aa, Homo sapiens
DFLGPASPQEEGGSESSTMTELETAMGMIIDVFSRYSGSEGSTQTLTKGELKVLMEKELPGFLQSGKDKDAVDKLLKDLDANGDAQVDFSEFIVFVAAITSACHKYFEKAGLK

SEQ ID NO: 2378 - protein, 314 aa, Homo sapiens
KMAATLGPLGSWQQWRRCLSARDGSRRLLLLLLLGSGQGPQQVGAGQTFEYLKREHSLSKPYQGEAPRPCFLRDWELQVHFKIHGQGKKNLHGDGLAIWYTKDRMQPGPVFGNMDKFVGLGVFVDTYPNEEKQQERVFPYISAMVNNGSLSYDHERDGRPTELGGCTAIVRNLHYDTFLVIRYVKRHLTIMMDIDGKHEWRDCIEVPGVRLPRGYYFGTSSITGDLSDNHDVISLKLFELTVERTPEEEKLHRDVFLPSVDNMKLPEMTAPLPPLSGLALFLIVFFSLVFSVFAIVIGIILYNKWQEQSRKRFY

SEQ ID NO: 2379 - protein, 192 aa, Homo sapiens
AAAASHRSRARSRPRRVSSGPAPRRAQSSAGRVASGLDSAPLCTMARALCRLPRRGLWLLLAHHLFMTTACQEANYGALLRELCLTQFQVDMEAVGETLWCDWGRTIRSYRELADCTWHMAEKLGCFWPNAEVDRFFLAVHGRYFRSCPISGRAVRDPPGSILYPFIVVPITVTLLVTALVVWQSKRTEGIV

SEQ ID NO: 2380 - protein, 326 aa, Homo sapiens
DSSTVKGGSESRHLCLIPDLKGKARTREASSGSRTCGRRTSLCTSAKSSWTYRSGRLSWQSIKGTHLTITQALRQPLHRAPLLPGQLCWSPRPLEKNKAMGRPLLLPLLLLLQPPAFLQPGGSTGSGPSYLYGVTQPKHLSASMGGSVEIPFSFYYPWELAIVPNVRISWRRGHFHGQSFYSTRPPSIHKDYVNRLFLNWTEGQESGFLRISNLRKEDQSVYFCRVELDTRRSGRQQLQSIKGTKLTITQAVTTTTTWRPSSTTTIAGLRVTESKGHSESWHLSLDTAIRVALAVAVLKTVILGLLCLLLLWWRRRKGSRAPSSDF

SEQ ID NO: 2381 - protein, 188 aa, Homo sapiens
RRTAGIYPCFPKPGRTRHALCSVVLLLLTGQLAFDDFQESCAMMWQKYAGSRRSMPLGARILFHGVFYAGGFAIVYYLIQKFHSRALYYKLAVEQLQSHPEAQEALGPPLNIHYLKLIDRENFVDIVDAKLKIPVSGSKSEGLLYVHSSRGGPFQRWHLDEVFLELKDGQQIPVFKLSGENGDEVKKE

SEQ ID NO: 2382 - protein, 532 aa, Homo sapiens
RRRPRLLPGAEPCEPRVGPRRADMGCSAKARWAAGALGVAGLLCAVLGAVMIVMVPSLIKQQVLKNVRIDPSSLSFNMWKEIPIPFYLSVYFFDVMNPSEILKGEKPQVRERGPYVYREFRHKSNITFNNNDTVSFLEYRTFQFQPSKSHGSESDYIVMPNILVLGAAVMMENKPMTLKLIMTLAFTTLGERAFMNRTVGEIMWGYKDPLVNLINKYFPGMFPFKDKFGLFAELNNSDSGLFTGFTGVQNISRIHLVDKWNGLSKVDFWHSDQCNMINGTSGQMWPPFMTPESSLEFYSPEACRSMKLMYKESGVFEGIPTYRFVAPKTLFANGSIYPPNEGFCPCLESGIQNVSTCRFSAPLFLSHPHFLNADPVLAEAVTGLHPNQEAHSLFLDIHPVTGIPMNCSVKLQLSLYMKSVAGIGQTGKIEPVVLPLLWFAESGAMEGETLHTFYTQLVLMPKVMHYAQYVLLALGCVLLLVPVICQIRSQEKCYLFWSSSKKGSKDKEAIQAYSESLMTSAPKGSVLQEAKL

SEQ ID NO: 2383 - protein, 57 aa, Homo sapiens
AHLPDTLLLPPHSPTVPTPKSFQCSQKACFSRSFCLLLSLVSSSLVSLSLCPPLTQA

SEQ ID NO: 2384 - protein, 158 aa, Homo sapiens
VTTSCIIPFAFGLGVRASERLAEIDMPYLLKYQPMMQTIGQKYCMDPAVIAGVLSRKSPGDKILVNMGDRTSMVQDPGSQAPTSWISESQVFQTTEVLTTRITELQRRFPTWTPDQYLRGGLCAYSGGAGYVRSSQDLSCDFCNDVLARAKYLKRHGF

SEQ ID NO: 2385 - protein, 180 aa, Homo sapiens
AMASTLEYSPSPLRRLVGPAAGFSRAARADLSWDPMAFFTGLWGPFTCVSRVLSHHCFSTTGSLSAIQKMTRVRVVDNSALGNSPYHRAPRCIHVYKKNGVGKVGDQILLAIKGQKKKALIVGHCMPGPRMTPRFDSNNVVLIEDNGNPVGTRIKTPIPTSLRKREGEYSKVLAIAQNFV

SEQ ID NO: 2386 - protein, 187 aa, Homo sapiens
PTRAHSFDLCCSPCRRRLLGREEAGEEPTSPVTQYLQPRSPEECKMFACAKLACTPSLIRAGSRVAYRPISASVLSRPEASRTGEGSTVFNGAQNGVSQLIQREFQTSAISRDIDTAAKFIGAGAATVGVAGSGAGIGTVFGSLIIGYARNPSLKQQLFSYAILGFALSEAMGLFCLMVAFLILFAM

SEQ ID NO: 2387 - protein, 787 aa, Homo sapiens
SPGPSLPESAESLDGSQEDKPRGSCAEPTFTDTGMVAHINNSRLKAKGVGQHDNAQNFGNQSFEELRAACLRKGELFEDPLFPAEPSSLGFKDLGPNSKNVQNISWQRPKDIINNPLFIMDGISPTDICQGILGDCWLLAAIGSLTTCPKLLYRVVPRGQSFKKNYAGIFHFQIWQFGQWVNVVVDDRLPTKNDKLVFVHSTERSEFWSALLEKAYAKLSGSYEALSGGSTMEGLEDFTGGVAQSFQLQRPPQNLLRLLRKAVERSSLMGCSIEVTSDSELESMTDKMLVRGHAYSVTGLQDVHYRGKMETLIRVRNPWGRIEWNGAWSDSAREWEEVASDIQMQLLHKTEDGEFWMSYQDFLNNFTLLEICNLTPDTLSGDYKSYWHTTFYEGSWRTGSSAGGCRNHPGTFWTNPQFKISLPEGDDPEDDAEGNVVVCTCLVALMQKNWRHARQQGAQLQTIGFVLYAVPKEFQNIQDVHLKKEFFTKYQDHGFSEIFTNSREVSSQLRLPPGEYIIIPSTFEPHRDADFLLRVFTEKHSESWELDEVNYAEQLQEEKVSEDDMDQDFLHLFKIVAGEGKEIGVYELQRLLNRMAIKFKSFKTKGFGLDACRCMINLMDKDGSGKLGLLEFKILWKKLKKWMDIFRECDQDHSGTLNSYEMRLVIEKAGIKLNNKVMQVLVARYADDDLIIDFDSFISCFLRLKTMFTFFLTMDPKNTGHICLSLEQVLGEGWEGICRIAPACPSTPPPPSSDVPGPASCPRLFPPWDLLPVSTVAADDHVGIEAL

SEQ ID NO: 2388 - protein, 496 aa, Homo sapiens
RSRMARAPLGVLLLLGLLGRGVGKNEELRLYHHLFNNYDPGSRPVREPEDTVTISLKVTLTNLISLNEKEETLTTSVWIGIDWQDYRLNYSKDDFGGIETLRVPSELVWLPEIVLENNIDGQFGVAYDANVLVYEGGSVTWLPPAIYRSVCAVEVTYFPFDWQNCSLIFRSQTYNAEEVEFTFAVDNDGKTINKIDIDTEAYTENGEWAIDFCPGVIRRHHGGATDGPGETDVIYSLIIRRKPLFYVINIIVPCVLISGLVLLAYFLPAQAGGQKCTVSINVLLAQTVFLFLIAQKIPETSLSVPLLGRFLIFVMVVATLIVMNCVIVLNVSQRTPTTHAMSPRLRHVLLELLPRLLGSPPPPEAPRAASPPRRASSVGLLLRAEELILKKPRSELVFEGQRHRQGTWTAAFCQSLGAAAPEVRCCVDAVNFVAESTRDQEATGEEVSDWVRMGNALDNICFWAALVLFSVGSSLIFLGAYFNRVPDLPYAPCIQP

SEQ ID NO: 2389 - protein, 300 aa, Homo sapiens
PGRERPGGGGARRRPQHLPALLPSERPDCATLQAMENELPVPHTSSSACATSSTSGASSSSGCNNSSSGGSGRPTGPQISVYSGIPDRQTVQVIQQALHRQPSTAAQYLQQMYAAQQQHLMLQTAALQQQHLSSAQLQSLAAVQQASLVSNRQGSTSGSNVSAQAPAQSSSINLAASPAAAQLLNRAQSVNSAAASGIAQQAVLLGNTSSPALTASQAQMYLRAQMLIFTPTATVATVQPELGTGSPARPPTPAQVQNLTLRTQQTPAAAASGPTPTQPVLPSLALKPTPGGSQPLPTPA

SEQ ID NO: 2390 - protein, 430 aa, Homo sapiens
ASQLAFGGKLTSTPSRDFQGCGRGAVTCCSFHEHRHQSGRCLSTGMAPNLKGRPRKKKPCPQRRDSFSGVKDSNNNSDGKAVAKVKCEARSALTKPKNNHNCKKVSNEEKPKVAIGEECRADEQAFLVALYKYMKERKTPIERIPYLGFKQINLWTMFQAAQKLGGYETITARRQWKHIYDELGGNPGSTSAATCTRRHYERLILPYERFIKGEEDKPLPPIKPRKQENSSQENENKTKVSGTKRIKHEIPKSKKEKENAPKPQDAAEVSSEQEKEQETLISQKSIPEPLPAADMKKKIEGYQEFSAKPLASRVDPEKDNETDQGSNSEKVAEEAGEKGPTPPLPSAPLAPEKDSALVPGASKQPLTSPSALVDSKQESKLCCFTESPESEPQEASFPRLPHHTGHRWQTRMRRRMTNCPPWQITLPTAP

SEQ ID NO: 2391 - protein, 459 aa, Homo sapiens
LLQEMCTKTIPVLWGCFLLWNLYVSSSQTIYPGIKARITQRALDYGVQAGMKMIEQMLKEKKLPDLSGSESLEFLKVDYVNYNFSNIKISAFSFPNTSLAFVPGVGIKALTNHGTANISTDWGFESPLFVLYNSFAEPMEKPILKNLNEMLCPIIASEVKALNANLSTLEVLTKIDNYTLLDYSLISSPEITENYLDLNLKGVFYPLENLTDPPFSPVPFVLPERSNSMLYIGIAEYFFKSASFAHFTAGVFNVTLSTEEISNHFVQNSQGLGNVLSRIAEIYILSQPFMVRIMATEPPIINLQPGNFTLDIPASIMMLTQPKNSTVETIVSMDFVASTSVGLVILGQRLVCSLSLNRFRLALPESNRSNIEVLRFENILSSILHFGVLPLANAKLQQGFPLPNPHKFLFVNSDIEVLEGFLLISTDLKYETSSKQQPSFHVWEGLNLISRQWRGKSAP

SEQ ID NO: 2392 - protein, 122 aa, Homo sapiens
ARRIARTRESKAAVSQDNVPALQPGKKKKLRLGGKKKKFKFFRLPKEFKKQLMYSPSNFKKMTSLAGNTVQCLNKLKYVIYSAQYPAYGNITTLDMITSTDHVLEQDFWICFTFYSVKERQI

SEQ ID NO: 2393 - protein, 114 aa, Homo sapiens
GLKTRAPATPTFQREVLGPAKQDMQRRCPRIGLMTSLLKPIKRRWRDYKRWKSGGFTGESCHHADTLGDRGGLQGDHSELLQWQKRILRTEGEPSPKYISKNIFPICSYITGFL

SEQ ID NO: 2394 - protein, 399 aa, Homo sapiens
GTVKTSVATPITAGHSCSSGGVLQVKSPATQSGFKFTSKMEDFNMESDSFEDFWKGEDLSNYSYSSTLPPFLLDAAPCEPESLEINKYFVVIIYALVFLLSLLGNSLVMLVILYSRVGRSVTDVYLLNLALADLLFALTLPIWAASKVNGWIFGTFLCKVVSLLKEVNFYSGILLLACISVDRYLAIVHATRTLTQKRYLVKFICLSIWGLSLLLALPVLLFRRTVYSSNVSPACYEDMGNNTANWRMLLRILPQSFGFIVPLLIMLFCYGFTLRTLFKAHMGQKHRAMRVIFAVVLIFLLCWLPYNLVLLADTLMRTQVIQETCERRNHIDRALDATEILGILHSCLNPLIYAFIGQKFRHGLLKILAIHGLISKDSLPKDSRPSFVGSSSGHTSTTL

SEQ ID NO: 2395 - protein, 977 aa, Homo sapiens
FRANLAITVANRRGAQGGKMHTCCPPVTLEQDLHRKMHSWMLQTLAFAVTSLVLSCAETIDYYGEICDNACPCEEKDGILTVSCENRGIISLSEISPPRFPIYHLLLSGNLLNRLYPNEFVNYTGASILHLGSNVIQDIETGAFHGLRGLRRLHLNNNKLELLRDDTFLGLENLEYLQVDYNYISVIEPNAFGKLHLLQVLILNDNLLSSLPNNLFRFVPLTHLDLRGNRLKLLPYVGLLQHMDKVVELQLEENPWNCSCELISLKDWLDSISYSALVGDVVCETPFRLHGRDLDEVSKQELCPRRLISDYEMRPQTPLSTTGYLHTTPASVNSVATSSSAVYKPPLKPPKGTRQPNKPRVRPTSRQPSKDLGYSNYGPSIAYQTKSPVPLECPTACSCNLQISDLGLNVNCQERKIESIAELQPKPYNPKKMYLTENYIAVVRRTDLLEATGLDLLHLGNNRISMIQDRAFGDLTNLRRLYLNGNRIERLSPELFYGLQSLQYLFLQYNLIREIQSGTFDPVPNLQLLFLNNNLLQAMPSGVFSGLTLLRLNLRSNHFTSLPVSGVLDQLKSLIQIDLHDNPWDCTCDIVGMKLWVEQLKVGVLVDEVICKAPKKFAETDMRSIKSELLCPDYSDVVVSTPTPSSIQVPARTSAVTPAVRLNSTGAPASLGAGGGASSVPLSVLILSLLLVFIMSVFVAAGLFVLVMKRRKKNQSDHTSTNNSDVSSFNMQYSVYGGGGGTGGHPHAHVHHRGPALPKVKTPAGHVYEYIPHPLGHMCKNPIYRSREGNSVEDYKDLHELKVTYSSNHHLQQQQQPPPPPQQPQQQPPPQLQLQPGEEERRESHHLRSPAYSVSTIEPREDLLSPVQDADRFYRGILEPDKHCSTTPAGNSLPEYPKFPCSPAAYTFSPNYDLRRPHQYLHPGAGDSRLREPVLYSPPSAVFVEPNRNEYLELKAKLNVEPDYLEVLEKQTTFSQF

SEQ ID NO: 2396 - protein, 141 aa, Homo sapiens
SPSAAGGLAWVSLALGSGSRGRDHSGSGVGTAMAGALVRKAADYVRSKDFRDYLMSTHFWGPVANWGLPIAAINDMKKSPEIISGRMTFALCCYSLTFMRFAYKVQPRNWLLFACHATNEVAQLIQGGRLIKHEMTKTASA

SEQ ID NO: 2397 - protein, 84 aa, Homo sapiens
ALPGTPQQTVTLNTDGKVKSFTSPHSNPNLPPAKFFTSLQSLNWSSHLPPSPATESVGKRGNAKPPTTKLLHSSPLWNFFAQQL

SEQ ID NO: 2398 - protein, 1684 aa, Homo sapiens
PEVTKPSLSQPTAASPIGSSPSPPVNGGNNAKRVAVPNGQPPSAARYMPREVPPRFRCQQDHKVLLKRGQPPPPSCMLLGGGAGPPPCTAPGANPNNAQVTGALLQSESGTAPDSTLGGAAASNYANSTWGSGASSNNGTSPNPIHIWDKVIVDGSDMEEWPCIASKDTESSSENTTDNNSASNPGSEKSTLPGSTTSNKGKGSQCQSASSGNECNLGVWKSDPKAKSVQSSNSTTENNNGLGNWRNVSGQDRIGPGSGFSNFNPNSNPSAWPALVQEGTSRKGALETDNSNSSAQVSTVGQTSREQQSKMENAGVNFVVSGREQAQIHNTDGPKNGNTNSLNLSSPNPMENKGMPFGMGLGNTSRSTDAPSQSTGDRKTGSVGSWGAARGPSGTDTVSGQSNSGNNGNNGKEREDSWKGASVQKSTGSKNDSWDNNNRSTGGSWNFGPQDSNDNKWGEGNKMTSGVSQGEWKQPTGSDELKIGEWSGPNQPNSSTGAWDNQKGHPLLENQGNAQAPCWGRSSSSTGSEVEGQSTGSNHKAGSSDSHNSGRRSYRPTHPDCQAVLQTLLSRTDLDPRVLSNTGWGQTQIKQDTVWDIEEVPRPEGKSDKGTEGWESAATQTKNSGGWGDAPSQSNQMKSGWGELSASTEWKDPKNTGGWNDYKNNNSSNWGGGRPDEKTPSSWNENPSKDQGWGGGRQPNQGWSSGKNGWGEEVDQTKNSNWESSASKPVSGWGEGGQNEIGTWGNGGNASLASKGGWEDCKRSPAWNETGRQPNSWNKQHQQQQPPQQPPPPQPEASGSWGGPPPPPPGNVRPSNSSWSSGPQPATPKDEEPSGWEEPSPQSISRKMDIDDGTSAWGDPNSYNYKNVNLWDKNSQGGPAPREPNLPTPMTSKSASDSKSMQDGWGESDGPVTGARHPSWEEEEDGGVWNTTGSQGSASSHNSASWGQGGKKQMKCSLKGGNNDSWMNPLAKQFSNMGLLSQTEDNPSSKMDLSVGSLSDKKFDVDKRAMNLGDFNDIMRKDRSGFRPPNSKDMGTTDSGPYFEKGGSHGLFGNSTAQSRGLHTPVQPLNSSPSLRAQVPPQFISPQVSASMLKQFPNSGLSPGLFNVGPQLSPQQIAMLSQLPQIPQFQLACQLLLQQQQQQQLLQNQRKISQAVRQQQEQQLARMVSALQQQQQQQQRQPGMKHSPSHPVGPKPHLDNMVPNALNVGLPDLQTKGPIPGYGSGFSSGGMDYGMVGGKEAGTESRFKQWTSMMEGLPSVATQEANMHKNGAIVAPGKTRGGSPYNQFDIIPGDTLGGHTGPAGDSWLPAKSPPTNKIGSKSSNASWPPEFQPGVPWKGIQNIDPESDPYVTPGSVLGGTATSPIVDTDHQLLRDNTTGSNSSLNTSLPSPGAWPYSASDNSFTNVHSTSAKFPDYKSTWSPDPIGHNPTHLSNKMWKNHISSRNTTPLPRPPPGLTNPKPSSPWSSTAPRSVRGWGTQDSRLASASTWSDGGSVRPSYWLVLHNLTPQIDGSTLRTICMQHGPLLTFHLNLTQGTALIRYSTKQEAAKAQTALHMCVLGNTTILAEFATDDEVSRFLAQAQPPTPAATPSAPAAGWQSLETGQNQSDPVGPALNLFGGSTGLGQWSSSAGGSSGADLAGASLWGPPNYSSSLWGVPTVEDPHRMGSPAPLLPGDLLGGGSDSI

SEQ ID NO: 2399 - protein, 395 aa, Homo sapiens
VPWKRQDEQLSLQVETLYLDSPAVIHLLSPTFLPPSSLPPFLQIVDSSSSACTLDSFFPFLAPWDSPQDCGFKDHQPLTLQALTVELARWTLMLLLSTAMYGAHAPLLALCHVDGRVPFRPSSAVLLTELTKLLLCAFSLLVGWQAWPQGPPPWRQAAPFALSALLYGANNNLVIYLQRYMDPSTYQVLSNLKIGSTAVLYCLCLRHRLSVRQGLALLLLMAAGACYAAGGLQVPGNTLPSPPPAAAASPMPLHITPLGLLLLILYCLISGLSSVYTELLMKRQRLPLALQNLFLYTFGVLLNLGLHAGGGSGPGLLEGFSGWAALVVLSQALNGLLMSAVMKHGSSITRLFVVSCSLVVNAVLSAVLLRLQLTAAFFLATLLIGLAMRLYYGSR

SEQ ID NO: 2400 - protein, 552 aa, Homo sapiens
WVSSMGFEELLEQVGGFGPFQLRNVALLALPRVLLPLHFLLPIFLAAVPAHRCALPGAPANFSHQDVWLEAHLPREPDGTLSSCLRFAYPQALPNTTLGEERQSRGELEDEPATVPCSQGWEYDHSEFSSTIATESQWDLVCEQKGLNRAASTFFFAGVLVGAVAFGYLSDRFGRRRLLLVAYVSTLVLGLASAASVSYVMFAITRTLTGSALAGFTIIVMPLELEWLDVEHRTVAGVLSSTFWTGGVMLLALVGYLIRDWRWLLLAVTLPCAPGILSLWWVPESARWLLTQGHVKEAHRYLLHCARLNGRPVCEDSFSQEAVSKVAAGERVVRRPSYLDLFRTPRLRHISLCCVVVWFGVNFSYYGLSLDVSGLGLNVYQTQLLFGAVELPSKLLVYLSVRYAGRRLTQAGTLLGTALAFGTRLLVSSDMKSWSTVLAVMGKAFSEAAFTTAYLFTSELYPTVLRQTGMGLTALVGRLGGSLAPLAALLDGVWLSLPKLTYGGIALLAAGTALLLPETRQAQLPETIQDVERKSAPTSLQEEEMPMKQVQN

SEQ ID NO: 2401 - protein, 370 aa, Homo sapiens
EIRTPVAVSSAPSGDSEGDEEETTQDEVSSHTSEEDGGVVKVEKELENTEQPVGGNEVVEHEVTGNLNSDPLLELCQCPLCQLDCGSREQLIAHVYQHTAAVVSAKSYMCPVCGRALSSPGSLGRHLLIHSEDQRSNCAVCGARFTSHATFNSEKLPEVLNMESLPTVHNEGPSSAEGKDIAFSPPVYPAGILLVCNNCAAYRKLLEAQTPSVRKWALRRQNEPLEVRLQRLERERTAKKSRRDNETPEEREVRRMRDREAKRLQRMQETDEQRARRLQRDREAMRLKRANETPEKRQARLIREREAKRLKRRLEKMDMMLRAQFGQDPSAMAALAAEMNFFQLPVSGVELDSQLLGKMAFEEQNSSSLH

SEQ ID NO: 2402 - protein, 345 aa, Homo sapiens
RHGHGGRDRRGGGRVARPGGLGRYPGRGAAASLVFVPTRRRSGPSGTASVAAMAYHSGYGAHGSKHRARAAPDPPPLFDDTSGGYSSQPGGYPATGADVAFSVNHLLGDPMANVAMAYGSSIASHGKDMVHKELHRFVSVSKLKYFFAVDTAYVAKKLGLLVFPYTHQNWEVQYSRDAPLPPRQDLNAPDLYIPTMAFITYVLLAGMALGIQKRFSPEVLGLCASTALVWVVMEVLALLLGLYLATVRSDLSTFHLLAYSGYKYVGMILSVLTGLLFGSDGYYVALAWTSSALMYFIVRSLRTAALGPDSMGGPVPRQRLQLYLTLGAAAFQPLIIYWLTFHLVR

SEQ ID NO: 2403 - protein, 236 aa, Homo sapiens
RPPRVWYPELRELSAAAPRWSHRTAPGIMVFYFTSSSVNSSAYTIYMGKDKYENEDLIKHGWPEDIWFHVDKLSSAHVYLRLHKGENIEDIPKEVLMDCAHLVKANSIQGCKMNNVNVVYTPWSNLKKTADMDVGQIGFHRQKDVKIVTVEKKVNEILNRLEKTKVERFPDLAAEKECRDREERNEKKAQIQEMKKREKEEMKKKREMDELRSYSSLMKVENMSSNQDGNDSDEFM

SEQ ID NO: 2404 - protein, 61 aa, Homo sapiens
REATTLACRNSCWVFSRCSLGACKPTVCSMPSLSRQGSQTLCLRLAEYCMESVDSQRLLLS

SEQ ID NO: 2405 - protein, 225 aa, Homo sapiens
QQESPAAGAARMNCKEGTDSSCGCRGNDEKKMLKCVVVGDGAVGKTCLLMSYANDAFPEEYVPTVFDHYAVTVTVGGKQHLLGLYDTAGQEDYNQLRPLSYPNTDVFLICFSVVNPASYHNVQEEWVPELKDCMPHVPYVLIGTQIDLRDDPKTLARLLYMKEKPLTYEHGVKLAKAIGAQCYLECSALTQKGLKAVFDEAILTIFHPKKKKKRCSEGHSCCSII

SEQ ID NO: 2406 - protein, 23 aa, Homo sapiens
NPRIQLSGNSCCAGSCRVWLSEQ

SEQ ID NO: 2407 - protein, 157 aa, Homo sapiens
PAGIRHEQARGADRMGKCRGLRTARKLRSHRRDQKWHDKQYKKAHLGTALKANPFGGASHAKGIVLEKVGVEAKQPNSAIRKCVRVQLIKNGKKITAFVPNDGCLNFIEENDEVLVAGFGRKGHAVGDIPGVRFKVVKVANVSLLALYKGKKERPRS

SEQ ID NO: 2408 - protein, 236 aa, Homo sapiens
PGLSQEPSGSMETVVIVAIGVLATIFLASFAALVLVCRQRYCRPRDLLQRYDSKPIVDLIGAMETQSEPSELELDDVVITNPHIEAILENEDWIEDASGLMSHCIAILKICHTLTEKLVAMTMGSGAKMKTSASVSDIIVVAKRISPRVDDVVKSMYPPLDPKLLDARTTALLLSVSHLVLVTRNACHLTGGLDWIDQSLSAAEEHLEVLREAALASEPDKGLPGPEGFLQEQSAI

SEQ ID NO: 2409 - protein, 170 aa, Homo sapiens
MRLQGAIFVLLPHLGPILVWLFTRDHMSGWCEGPRMLSWCPFYKVLLLVQTAIYSVVGYASYLVWKDLGGGLGWPLALPLGLYAVQLTISWTVLVLFFTVHNPGLALLHLLLLYGLVVSTALIWHPINKLAALLLLPYLAWLTVTSALTYHLWRDSLCPVHQPQPTEKSD

SEQ ID NO: 2410 - protein, 26 aa, Homo sapiens
PKLSVYPLQSHHCLSEPFQSLVCCLA

SEQ ID NO: 2411 - protein, 275 aa, Homo sapiens
SCKTENLLEMWWFQQGLSFLPSALVIWTSAAFIFSYITAVTLHHIDPALPYISDTGTVAPEKCLFGAMLNIAAVLCIATIYVRYKQVHALSPEENVIIKLNKAGLVLGILSCLGLSIVANFQKTTLFAAHVSGAVLTFGMGSLYMFVQTILSYQMQPKIHGKQVFWIRLLLVIWCGVSALSMLTCSSVLHSGNFGTDLEQKLHWNPEDKGYVLHMITTAAEWSMSFSFFGFFLTYIRDFQKISLRVEANLHGLTLYDTAPCPINNERTRLLSRDI

SEQ ID NO: 2412 - protein, 254 aa, Homo sapiens
GGAPPASVPARESPVSGAQGSSRTRGHKRAAGARAPQLCSSWQRRSAPAMSRGLQLLLLSCAYSLAPATPEVKVACSEDVDLPCTAPWDPQVPYTVSWVKLLEGGEERMETPQEDHLRGQHYHQKGQNGSFDAPNERPYSLKIRNTTSCNSGTYRCTLQDPDGQRNLSGKVILRVTGCPAQRKEETFKKYRAEIVLLLALVIFYLTLIIFTCKFARLQSIFPDFSKAGMERAFLPVTSPNKHLGLVTPHKTELV

SEQ ID NO: 2413 - protein, 159 aa, Homo sapiens
CETSTSSAGHAPCRHAAQGPPAEPTGLRLCSEHQRLHAWPPGPRRPSLWPPKNGKWHSGKRTAGGRPQRRPSRRQSQRPSAWSGSPRMHSPGQKCSLMCPHRSQDSLSTAIFQRSPGANTGRALHCVLSKEMKSVQRSLGLSRIHLQSKRKIIHFVLTR

SEQ ID NO: 2414 - protein, 370 aa, Homo sapiens
LKDTLKSQMTQEASDEAEDMKEAMNRMIDELNKQVSELSQLYKEAQAELEDYRKRKSLEDVTAEYIHKAEHEKLMQLTNVSRAKAEDALSEMKSQYSKVLNELTQLKQLVDAQKENSVSITEHLQVITTLRTAAKEMEEKISNLKEHLASKEVEVAKLEKQLLEEKAAMTDAMVPRSSYEKLQSSLESEVSVLASKLKESVKEKEKVHSEVVQIRSEVSQVKREKENIQTLLKSKEQEVNELLQKFQQAQEELAEMKRYSESSSKLEEDKDKKINEMSKEVTKLKEALNSLSQLSYSTSSSKRQSQQLEALQQQVKQLQNQLAECKKQHQEVISVYRMHLLYAVQGQMDEDVQKVLKQILTMCKNQSQKK

SEQ ID NO: 2415 - protein, 219 aa, Homo sapiens
AAATAASLSPRGCRLRTPSSDVGPSRAPPPSAAPLPTGRAQMSPSGRLCLLTIVGLILPTRGQTLKDTTSSSSADATIMDIQVPTRAPDAVYTELQPTSPTPTWPADETPQPQTQTQQLEGTDGPLVTDPETHKSTKAAHPTDDTTTLSERPSPSTDVQTDPQTLKPSGFHEDDPFFYDEHTLRKRGLLVAAVLFITGIIILTSGKCRQLSRLCRNHCR

SEQ ID NO: 2416 - protein, 534 aa, Homo sapiens
FVGEQEGGCEAGAGRGAQTYPGEAGERWFGRRRRRGRVVSRKKMSLKSERRGIHVDQSDLLCKKGCGYYGNPAWQGFCSKCWREEYHKARQKQIQEDWELAERLQREEEEAFASSQSSQGAQSLTFSKFEEKKTNEKTRKVTTVKKFFSASSRVGSKKEIQEAKAPSPSINRQTSIETDRVSKEFIEFLKTFHKTGQEIYKQTKLFLEGMHYKRDLSIEEQSECAQDFYHNVAERMQTRGKVPPERVEKIMDQIEKYIMTRLYKYVFCPETTDDEKKDLAIQKRIRALRWVTPQMLCVPVNEDIPEVSDMVVKAITDIIEMDSKRVPRDKLACITKCSKHIFNAIKITKNEPASADDFLPTLIYIVLKGNPPRLQSNIQYITRFCNPSRLMTGEDGYYFTNLCCAVAFIEKLDAQSLNLSQEDFDRYMSGQTSPRKQEAESWSPDACLGVKQMYKNLDLLSQLNERQERIMNEAKKLEKDLIDWTDGIAREVQDIVEKYPLEIKPPNQPLAAIDSENVENDKLPPPLQPQVYAG

SEQ ID NO: 2417 - protein, 47 aa, Homo sapiens
SNMREVGCGWLVPVIPAFWEAEVGGSLEARSLRQAWATKQDPISKKK

SEQ ID NO: 2418 - protein, 18 aa, Homo sapiens
PCRPGMECNSMISVHCNL

SEQ ID NO: 2419 - protein, 18 aa, Homo sapiens
PCRPGMECNSMISVHCNL

SEQ ID NO: 2420 - protein, 461 aa, Homo sapiens
  misc_feature (1)...(461): Xaa = any amino acid or nothing
PYPQGGYPQGPYPQEGYPQGPYPQGGYPQGPYPQSPFPPNPYGQPQVFPGQDPDSPQHGNYQEEGPPSYYDNQDFPATNWDDKSIRQAFIRKVFLVLTLQLSVTLSTVSVFTFVAEVKGFVRENVWTYYVSYAVFFISLIVLSCCGDFRRKHPWNLVALSVLTASLSYMVGMIASFYNTEAVIMAVGITTAVCFTVVIFSMQTRYDFTSCMGVLLVSMVVLFIFAILCIFIRNRILEIVYASLGALLFTCFLAVDTQLLLGNKQLSLSPEEYVFAALNLYTDIINIFLYILTIIGRAKEXPSSSSLCPLRWHGWPGPCPWHGSASCTSPLSCPQAQPREKDASLQPSCMYTADTSIWTRCGHSMAPLVLPPPPRGTKATFPCHLLSTHCCMSPVCQPTPGTGGSTRSRGEGLSQEVRVHVFPPVPAPQPGVEHPSPPPHPPGVLPSGDMRSGGLIPVLSPE

SEQ ID NO: 2421 - protein, 118 aa, Homo sapiens
  misc_feature (1)...(118): Xaa = any amino acid or nothing
ARGNTLYHLPRLCRKLNLRWFSASTLYDVQHDDKMGSNTFFKRNDCRYVMISCKADMAYDNVRHPFMIXSIKLIMEETYLNIIKAVYDRPTASIILNGEKLKVFPVRSGTXQGCSVWP

SEQ ID NO: 2422 - protein, 206 aa, Homo sapiens
  misc_feature (1)...(206): Xaa = any amino acid or nothing
MESVLSKYEDQITIFTDYLEEYPDTDELVWILGKQHLLKTEKSKLLSDISARLWFTYRRKFSPIGGTGPSSDAGWGCMLRCGQMMLAQALICRHLGRDWSWEKQKEQPKEYQRILQCFLDRKDCCYSIHQMAQMGVGEGKSIGEWVLGPNTVAQGVXKNLALFDEWNSLGLVYVSMDNPSGSIARFPKKLCRVLPLSADTAGLTGP

SEQ ID NO: 2423 - protein, 89 aa, Homo sapiens
  misc_feature (1)...(89): Xaa = any amino acid or nothing
DFSVXGDVDIEVTCPICLQLLTEPLSLNCGLRLXQVCITAXIKESVIISGGXSSSPVCHTTFQPANLRTSRYLPTXSIKSLGPDEPQEG

SEQ ID NO: 2424 - protein, 123 aa, Homo sapiens
  misc_feature (1)...(123): Xaa = any amino acid or nothing
HLQGRSIRTLQLTGENEKNCEVSERIRRSGPWKEISFGDYICHTFQGDCWADRSPLHEAAAHGRLLALKTLIAQGVNVNLWTLDRVSSLHEACLXGPVACAKPYWKMVPRHGGTVTGPPLLMV

SEQ ID NO: 2425 - protein, 349 aa, Homo sapiens
  misc_feature (1)...(349): Xaa = any amino acid or nothing
RSGDRNGLTHQLGGLSQGSRNQSYRSRSRSRSRERPSAPRGIPFASASSSVYYGSYSRPYGSDKPWPSLLDKEREESLRQKRLSERERIGELGAPEVWGLSPKNPEPDSDEHTPVEDEEPKKSTTSASTSEEEKKKKSSRSKERSKKRRKKKSSKRKHKKYSEDSDSDSDSETDSSDEDNKRRAKKAKKKEKKKKHRSKKYKKKRSKKSRKESSDSSSKESQEEFLENPWKDRTKAEEPSDLIGPEAPKTLTSQDDKPLNYGHALLPGEGAAMAEYVKAGKRIPRRGEIGLTRXRNCHHLNAQVMXXVVSRHRRMEAVRTAKREPESTVLMRREPLHPFNPRRETKERE

SEQ ID NO: 2426 - protein, 214 aa, Homo sapiens
  misc_feature (1)...(214): Xaa = any amino acid or nothing
GRSTEAEKEPAFDERTGKGRRLPRAGEFHGXEXAPGPGPRSFQVSRKMPEEPPGARKHPFSGKSFYLDLPAGKNLQFLTGAIQQLGGVIEGFLSKEVSYIVSSRREVKAESSGKSHRGCPSPSPSEVRVETSAMVDPKGSHPRPSRKPVDSVPLSRGKELLQKAIRNQKXXCTVQQLSHCRLYGEKTTAKRSQREHVQQQSQEHGKWPDLKGPR

SEQ ID NO: 2427 - protein, 116 aa, Homo sapiens
  misc_feature (1)...(116): Xaa = any amino acid or nothing
AKIGAYKYIQELWRKKQSDVMHFLLRVRCWQYPALHRAGTEWQLSALHRAPRSTQPDKACRLGYKAKQGYIIYRICVRRGGWKCPVPKAVTYGKPVHHGVNXLKFAQSLQSVAEEQ

SEQ ID NO: 2428 - protein, 82 aa, Homo sapiens
  misc_feature (1)...(82): Xaa = any amino acid or nothing
ACPAENREVPEMAAGQAPHAGPGAGPGQPAPALPFAATPGSRGQALCRGGRRRQHLHGPLHRPXQAAPALHAGCQLAPHPPT

SEQ ID NO: 2429 - protein, 85 aa, Homo sapiens
  misc_feature (1)...(85): Xaa = any amino acid or nothing
NLIWKLCVTERRLVILDNYDLASEYEANKYICNRIIQFKPGQDKYFTLGLPTGSTPLXCYPKLIEYNKNGHLSFKYVKTFSMDEY

SEQ ID NO: 2430 - protein, 468 aa, Homo sapiens
  misc_feature (1)...(468): Xaa = any amino acid or nothing
SSESPSDPGRMAMTWIVFSLWPLTVFMGHIGGHSLFSCEPITLRMCQDLPYNTTFMPNLLNHYDQQTAALAMEPFHPMVNLDCSRDFRPFLCALYAPICMEYGRVTLPCRRLCQRAYSECSKLMEMFGVPWPEDMECSRFPDCDEPYPRLVDLNLAGEPTEGAPVAVQRDYGFWCPRELKIDPDLGYSFLHVRDCSPPCPNMYFRREELSFARYFIGLISIICLSATLFTFVTFLIDVTRFRYPERPIKCYAVWHMMVSLIFFIGFLLEDRVACNASIPAQYKASTVTQGSHNKACTMLFMILYFFTMAGSVWWVILTITWFLAAVPKWGSEAIEKKALLFHASAWGIPGTLTIILLAMNKIEGDNISGVCFVGLYDVDALRYFVLAPLCLYVVVGVSLLLAGIISLNRVRIEIPLXKENQDKLVKFMIRIGVFSILYLVPLLVVIGCYFYEQAYRGIWETTWIQERC

SEQ ID NO: 2431 - protein, 121 aa, Homo sapiens
  misc_feature (1)...(121): Xaa = any amino acid or nothing
EERTKMSTGPDVKATVGDISSDGNLNVAQEECSRKGIVDEFFPLLSNXCIWTQPQGYPQSSYGTLANFVFCSVRHGLALILQLCNFSIYTQQMNLSIAIPAMVNNTAPPSQPNASTERPST

SEQ ID NO: 2432 - protein, 242 aa, Homo sapiens
  misc_feature (1)...(242): Xaa = any amino acid or nothing
PFGTPSSTMAVVKNKCLMKGGKKGVKKKVVGPFSKKDQYDVKAPAMFNIRNTGKTLVARTQGTQIASDGLKGLLFEVSLADLQNDEVAFRKFKLITEDVQDKNCLTNFYGMDLTCDKICSMVEKWSTMIEAHVDVKTTDGYFFHLFCVGFTKKHNNQILKTSYAXHQQSRQIQKKMMEIMTXEVQTNDLKEVVNKLIPDNIGKDTEKVCPIYPLHDVFIRKVKMLENPGFERMELRGGGSSS

SEQ ID NO: 2433 - protein, 120 aa, Homo sapiens
  misc_feature (1)...(120): Xaa = any amino acid or nothing
LTWPQPHIPSCPAMSEETLQSKLAAAKKKLPWGAVQGSRAMSDLLLLLLDLTLLLLLMLLGFAGYSGQLAGVAVSAGSPPIRYKFHVEPYGETGWLLTESCSISPKLCSIAVHXDNPAWF

SEQ ID NO: 2434 - protein, 54 aa, Homo sapiens
  misc_feature (1)...(54): Xaa = any amino acid or nothing
HYTPINTDTIENSENNKCWXGYXEVGLIHHWWGGKRVQPFWKRVWQKRTLNLRV

SEQ ID NO: 2435 - protein, 132 aa, Homo sapiens
  misc_feature (1)...(132): Xaa = any amino acid or nothing
HMGQLGYFIQCWWECKRLISFWKTIXQSPAKXTIYTSYDTAIPISGIYPKRMSSKCHQETCARMFILAPFTATIKGKQLTCPLVEERIDYMWYSHKYYIKVKRNLXVTITHTWVNLNILMFEIILWYSHKYY

SEQ ID NO: 2436 - protein, 53 aa, Homo sapiens
  misc_feature (1)...(53): Xaa = any amino acid or nothing
HXKILQVGRAQRAHXSRLXSQLLRRLRHESHLNPGARGCSEARLHRCTPAWTT

SEQ ID NO: 2437 - protein, 91 aa, Homo sapiens
  misc_feature (1)...(91): Xaa = any amino acid or nothing
LHVKHLGHFQLVFSEVICHCILMPVSXELQRLXERSVCAFHVCIQTYVCLQVYACMCVYYICMFVYSVYGCGLCTCVCMDVYICVCVQEFL

SEQ ID NO: 2438 - protein, 138 aa, Homo sapiens
  misc_feature (1)...(138): Xaa = any amino acid or nothing
NXKWILHVNVRIQSIFFIKRNQKINSHELKLDKKFLDMMSNAXSTKKHDKLDLIKFKTLCSAKYTVKRIKIHPTDLEKMLRNHLSDKDXYSGVYKDLSKLNRRKTESXVKKWVKDLSRYFIKEVISMENKHKKIFSTS

SEQ ID NO: 2439 - protein, 90 aa, Homo sapiens
  misc_feature (1)...(90): Xaa = any amino acid or nothing
MALTPESPSSFPGLAATGSSVPEPPGGPNATLNSSWDSPTEPSSLEDLEATGTIGTLLSDMGVVGVEDNAYTLEVNSRYMRAVGIMXIHL

SEQ ID NO: 2440 - protein, 116 aa, Homo sapiens
  misc_feature (1)...(116): Xaa = any amino acid or nothing
SNITITLTXMKKYDNTFCWXGCGQIGTLIYCWQESKFIQAFWSKIQQYLAXISIHILFDPAFLFLGGYPGGTQSVFLTGVLVSSVFYNMKMLHTRLLIAALFIIVQYWKQSKDHYI

SEQ ID NO: 2441 - protein, 119 aa, Homo sapiens
  misc_feature (1)...(119): Xaa = any amino acid or nothing
YPLPVCSYLSGPRGEHWNSLGGKSSCPLPLPTLVSSRFKISKVIVVGDLSVGKTCLINRXGGAGAELGRVGPSLARWAGSRSQHLVPSQVCKDSFDKNYKAPIGADFEMERFEVLGIPF

SEQ ID NO: 2442 - protein, 87 aa, Homo sapiens
  misc_feature (1)...(87): Xaa = any amino acid or nothing
SSFIKRHILIFEDDWHQTTCCHHPHHPFXRCQFHIFYVSVQNSISPSLSVSSSHPDRPDHEVHQHRAAHHHQHGQGPLGHGLVARVG

SEQ ID NO: 2443 - protein, 915 aa, Homo sapiens
  misc_feature (1)...(915): Xaa = any amino acid or nothing
ALLGLQQPAQSLILSRSSVMGVRGLQGFVGSTCPHICTVVNFKELAEHHRSKYPGCTPTIVVDAMCCLRYWYTPESWICGGQWREYFSALRDFVKTFTAAGIKLIFFFDGMVEQDKRDEWVKRRLKNNREISRIFHYIKSHKEQPGRNMFFIPSGLAVFTRFALKTLGQETLCSLQEADYEVASYGLQHNCLGILGEDTDYLIYDTCPYFSISELCLESLDTVMLCREKLCESLGLCVADLPLLACLLGNDIIPEGMFESFRYKCLSSYTSVKENFDKKGNIILAVSDHISKVLYLYQGEKKLEEILPLVTKQSSFLXRNGIISFTRTINLHGFSKNPKVXXLWTNKXYPRVQTPNPGKKFPCVQMLNPGKKFPCVQALNPGEKFPCIHIPEPRQEVPTCSDPEPRQEVPTCTGPESRREVPMCSDPEPRQEVPMCTGPEPRQEVPMCTGPEARQEVPMCTDSEPRQEVPMCTDSEPRQEVPMYTGSEPRQEVPMYTGPESRQEVPMYTGPESRQEVLIRTDPESRQEIMCTGHESKQEVPICTDPISKQEDSMCTHAEINQKLPVATDFEFKLEALMCTNPEIKQEDPTNVGPEVKQQVTMVSDTEILKVARTHHVQAESYLVYNIMSSGEIECSNTLEDELDQALPSQAFIYRPIRQRVYSLLLEDCQDVTSTCLAVKEWFVYPGNPLRHPDLVRPLQMTIPGGTPSLKILWLNQEPEIQVRRLDTLLACFNLSSSREELQAVESPFQALCCLLIYLFVQVDTLCLEDLHAFIAQALCLQGKSTSQLVNLQPDYINPRAVQLGSLLVRGLTTLVLVNSACGFPWKTSDFMPWNVFDGKLFHQKYLQSEKGYAVEVLCRTKXISAHQIPQPEGSRLQGLHEGEQTHHWPSPLGLTPRREVGKTGLQLPQDGLWV

SEQ ID NO: 2444 - protein, 245 aa, Homo sapiens
  misc_feature (1)...(245): Xaa = any amino acid or nothing
AREACRAKTDFPGRRFRLWPSCCCRVIVGAETXHMAEPVSPLKHFVLAKKAITAIFDQLLEFVTEGSHFVEATYKNPELDRIATEDDLVEMQGYKDKLSIIGEVLSRRHMKVAFFGRTSSGKSSVINAMLWDKVLPSGIGHITNCFLSVEGTDGDKAYLMTEGSDEKKSVKTVNQLAHALHMDKDLKAGCLVRVFWPKAKCALLRDDLVLVDGPGTDVTTELDSWIDKFCTKSSTREITNSGSDT

SEQ ID NO: 2445 - protein, 179 aa, Homo sapiens
  misc_feature (1)...(179): Xaa = any amino acid or nothing
LVLNSRVEDFVPPEGAGRTLPFALRPLAACWLLHRRARRSSALCPRPRSWGVSGGEGAGAREPXITSSSCCLSAASHLSIQSPNMAGARRRIRPQLAKEKIEGCHICTSVTPGEPQVFLGKDKAFTFDYVFDIDSQQEQIYIQCIEKLIEGCFEGYNATVFAYGQTGAGKTYTMGTGFD

SEQ ID NO: 2446 - protein, 94 aa, Homo sapiens
  misc_feature (1)...(94): Xaa = any amino acid or nothing
FFFFNVCKSPKVPKPGCKEESTGTLFKNTLISLGQHSETPSLKKKLAGYSGMCLXSQVLRRLRQEDCLSPGGGNCRESXSCPYTPAWITERDPV

SEQ ID NO: 2447 - protein, 121 aa, Homo sapiens
  misc_feature (1)...(121): Xaa = any amino acid or nothing
ARSTGFWGEILWCGFLKRSLALSPRVKCSGAILAHCNFRHAGFPPLSCLSLPNRWEYRRPPARPGKFFLVFLVETGFQCGXDGLDLLTSRSACLGLPKCWDYRREPAASIIFQTTFFINSK

SEQ ID NO: 2448 - protein, 141 aa, Homo sapiens
  misc_feature (1)...(141): Xaa = any amino acid or nothing
KVVVMSCEDINISGSFYRNKLKYLAFLCKRTSTNPSQGPYHLWVPSHIFWQTTCGRLPHKTKQGXAALDHLKVFDRIPLPYDKKKQMAVSATLEVVRPKPXRKFAYLGHWAQKVDWKYQAMTATMGEKRKVYYQKICYQKK

SEQ ID NO: 2449 - protein, 93 aa, Homo sapiens
  misc_feature (1)...(93): Xaa = any amino acid or nothing
IIFYSHQQCMRVWQGCGDIETLIHCWXEXKIIHSLWKTVXQFLKRLYLHLPHNSVIAFLGISPRKIKTCPQNSCTSMLINAIHNDQKWKKINI

SEQ ID NO: 2450 - protein, 60 aa, Homo sapiens
  misc_feature (1)...(60): Xaa = any amino acid or nothing
RQSLALSPRLECSGTISAHCRLCPLVFTPLSCLSLTSSWDYRRPPPHPANFLYFKXRRGF

SEQ ID NO: 2451 - protein, 92 aa, Homo sapiens
  misc_feature (1)...(92): Xaa = any amino acid or nothing
LFFLRKVSNQFLSPSLLPVNFQGFVFAFLLLLLFLLFEMESLPVARVECSGTISAHCNLCLPGSSDSPASASXVAGITDMCRYTQLILFHAS

SEQ ID NO: 2452 - protein, 258 aa, Homo sapiens
  misc_feature (1)...(258): Xaa = any amino acid or nothing
KTSMFWKFDLHSSSHIDTLLEREDVTLKELMDEEDVLQECKAQNRKLIEFLLKAECLEDLVSFIXEEPPQDMDEKIRYKYPNISCELLTSDVSQMNDRLGEDESLLMKLYSFLLNDSPLNPLLASFFSKVLSILISRKPEQIVDFLKKKHDFVDLIIKHIGTSAIMDLLLRLLTCIEPPQPRQDVLNWFKVQRNLXHSTXNVMDISKYVNLHWGLNKSHSLLXLLLQCVLQWLNEEKIIQRLVEIVHPSQEEDVSSLV

SEQ ID NO: 2453 - protein, 134 aa, Homo sapiens
  misc_feature (1)...(134): Xaa = any amino acid or nothing
GLHVYDFQVYREHILTLNVKKCSVSFWGLREWLYLQMYEIIKSPRFPIIKMTDITKCWXGCGAAGMQIHCWWCVNVGKFWEMSXYYLLKLSISTPYDPAIPLLGIYLXETRVYIHPKTCMRMLIAAPFVLAVNC

SEQ ID NO: 2454 - protein, 105 aa, Homo sapiens
  misc_feature (1)...(105): Xaa = any amino acid or nothing
KWLFSSLNITGRGDIIGHLKWLDCRNCSSFPIKRNRQTHSTESNKLKAGHSFGYNXLIHXNSVKTDCGCGANSKGVVVVMKVKTAQQKQTTSYMQIGTTKNSRAT

SEQ ID NO: 2455 - protein, 138 aa, Homo sapiens
  misc_feature (1)...(138): Xaa = any amino acid or nothing
DLLILRNLAFPELKRRNCISRFYLAYHLHKIYSRSILLCNNCSGFYILSLXQYDVFFFNYFFFRDRAWPCCPGWSAAWLTIVILAHYRRPGLERSCCLSLSSSWDHRRVPPCPANFXYFSMGFTAFPRLVLNSXTQGI

SEQ ID NO: 2456 - protein, 48 aa, Homo sapiens
  misc_feature (1)...(48): Xaa = any amino acid or nothing
ESGSLIHXWWENKPAQPLWWEIXQHVQKLPTHFPCDPAIPLLGICPED

SEQ ID NO: 2457 - protein, 188 aa, Homo sapiens
  misc_feature (1)...(188): Xaa = any amino acid or nothing
KPSSGSFIRAIYIFLSTAHVPALFSVLVRTKLTXAFSQSSVLWAHKQQKTSLSLVIRERLQIKTAVRENFLPIRLAKILKLDNVKCWQGSGSNMSLIHCWWEYNVIHIIWNSVTFPRKVEHVYITYAPEISVRXIHGGLPTLVHQETHTSVFRGAPSVIPETRCRPTKESINKLLHIYTMEHYGDENK

SEQ ID NO: 2458 - protein, 179 aa, Homo sapiens
  misc_feature (1)...(179): Xaa = any amino acid or nothing
GGNDCSVTPTTEPGRKEITXKRKFXEKTDRLPGAPPSRTPPTPYPCPHGDRLLPPSRPLPAGPASAFPPAERSRGHRRASLXRARWSAAVPRRSAGSASEPVQSRWLRLPVGSDSPPAVPVRVCPAPDSRPAAPGSRLPDPGLDSPAPSRTPSSSVDXGGQRPPPPSGDSLSPPGCCRY

SEQ ID NO: 2459 - protein, 57 aa, Homo sapiens
  misc_feature (1)...(57): Xaa = any amino acid or nothing
HESYHVNPNLCNPVAPTSGAHSIGXKWPSWLGAVAHSCNPSTLVGRGGRITRGQELR

SEQ ID NO: 2460 - protein, 108 aa, Homo sapiens
  misc_feature (1)...(108): Xaa = any amino acid or nothing
EEQFFFFAVGMFPXVDFLAPASGELWDRLRLTCSRPFTRHQSFGLAFLRVCSSLDSLDDSVVGPSALLSSVLNQGGRNVLEAREAAKHPTIXRQSLLRKQRNKRMAIP

SEQ ID NO: 2461 - protein, 23 aa, Homo sapiens
SFLSVRLECNGAIMAHCALPLPG

SEQ ID NO: 2462 - protein, 270 aa, Homo sapiens
  misc_feature (1)...(270): Xaa = any amino acid or nothing
RRRGGGSRPRRTPVPAPGPGPSFGMDVRFYPAAAGDPASLDFAQCLGYYGYSKFGNNNNYMNMAEANNAFFAASEQTFHTPSLGDEEFEIPPITPPPESDPALGMPDVLLPFQALSDPLPSQGSEFTPQFPPQSLDLPSITISRNLVEQDGVLHSSGLHMDQSHTQVSQYRQDPSLIMRPSSTXPDAARSGVMPPAQLTTINQSQLSAQLGLNLGGASMPHTSPSPPASKSATPSPSSSINEEDADEANRAIGEKRAAPDSGKKPKTPKK

SEQ ID NO: 2463 - protein, 134 aa, Homo sapiens
  misc_feature (1)...(134): Xaa = any amino acid or nothing
FLRPSFALVPQAGVQWCALSWLQPPSPRFKXFSCLSLPSSWDYRHVPPRPANFFVLLVETGFLHVGQAGHEPLTSGDPPASASQSAGITGVSHQAWPSFFIFSRDTVLLCCSGWSRTSGLKQSACLSLLKCWDY

SEQ ID NO: 2464 - protein, 75 aa, Homo sapiens
  misc_feature (1)...(75): Xaa = any amino acid or nothing
NQLPLQQWTFFIYETGFCSVAQAGVQCRDHSSLHPXPPGSSDPPAPPSXVLGITGQRYHACLIIYLYVQTVPQRV

SEQ ID NO: 2465 - protein, 143 aa, Homo sapiens
  misc_feature (1)...(143): Xaa = any amino acid or nothing
QRPLLRQQLGSWPTCRSLEGDLASPWXXRLPGSPRMRRSGTATLNLPLSPQGTVRTAVEFQVMTQTQSLSFLLGSSASLDCGFSMAPGLDLISVEWRLQHKGRGRGDLHLPDHHLSVPSSADHPAQQPSQFNGRNLYFLPLFR

SEQ ID NO: 2466 - protein, 246 aa, Homo sapiens
  misc_feature (1)...(246): Xaa = any amino acid or nothing
SASHEPAEHDGGADSLSASQPPRPAGRPAGAQHVHVPPWTDVLAGQDRRAPTAGDGAPWPAPGGHVPSTRPHDPAEFHADEAAGRGGRGLQPAAPHALPAGLPHGPPAPAPAEGGGTPXGSAGAGGPXGSPAGRACGAAGCRPRPPRPAASSAXNSAGSXGLVEGTXPPGAGHGAPSPAVGARLSCPARTSVQGGTWTCXAPAGRPAGLGGWEAERESAPPSCSAGSXDADXGAEPWGAGSRSWGS

SEQ ID NO: 2467 - protein, 186 aa, Homo sapiens
  misc_feature (1)...(186): Xaa = any amino acid or nothing
KSGHWAKECLQPRIPPRPCPICVGPHWKSDCPTCPGAVPRAPGTLPQGSLTDSFPDLLSLVAEDXCCLMASEASWTITELWVTLTVEGKSVPCLNTEATHSTLPSFQGPVSLASITVVGIDGQASKPLKTPQLWCQLGQYSFMHYFLVIPTCPVPLLGXGILTKLSAFLTIPRLQPHLIAALSPSS

SEQ ID NO: 2468 - protein, 156 aa, Homo sapiens
  misc_feature (1)...(156): Xaa = any amino acid or nothing
AAGQVVVEVTSHLYLCITSDAAGLRLLPPAESERGEGGHCPAEAPLPPRPQYCLAKHPLLRKLPEEKIKLDPYLTQHTKINSKQIKYLSVRAKTTQLVEGNIGVNLQNTELKQHXINGFLDTTPEAQETKEKTNKLNFIKKVKRQLAEWEKIFQIA

SEQ ID NO: 2469 - protein, 1060 aa, Homo sapiens
  misc_feature (1)...(1060): Xaa = any amino acid or nothing
ACPRLARRRRRVRSLRRRRGWLRARWSRGQNNMAARRITQETFDAVLQEKAKRYHMDASGEAVSETLQFKAQDLLRAVPRSRAEMYDDVHSDGRYSLSGSVAHSRDAGRESLRSDVFSGPSFRSSNPSISDDSYFRKECGRDLEFSHSNSRDQVIGHRKLGHFRSQDWKFALRGSWEQDFGHPVSQESSWSQEYSFGPSAVLGDFGSSRLIEKECLEKESRDYDVDHPGEADSVLRGGSQVQARGRALNIVDQEGSLLGKGETQGLLTAKGGVGKLVTLRNVSTKKIPTVNRITPKTQGTNQIQKNTPSPDVTLGTNPGTEDIQFPIQKIPLGLDLKNLRLPRRKMSFDIIDKSDVFSRFGIEIIKWAGFHTIKDDIKFSQLFQTLFELETETCAKMLASFKCSLKPEHRDFCFFTIKFLKHSALKTPRVDNEFLNMLLDKGAVKTKNCFFEIIKPFDKYIMRLQDRLLKSVTPLLMACNAYELSVKMKTLSNPLDLALALETTNSLCRKSLALLGQTFSLASSFRQEKILXAVGLQDIAPSPAAFPNFEDSTLFGREYIDHLKAWLVSSGCPLQVKKAEPEPMREEEKMIPPTKPEIQAKAPSSLSDAVPQRADHRVVGTIDQLVKRVIEGSLSPKERTLLKEDPAYWFLSDENSLEYKYYKLKLAEMQRMSENLRGADQKPTSADCAVRAMLYSRAVRNLKKKLLPWQRRGLLRAQGLRGWKARRATTGTQTLLFLRAPGLKHHGRQAPGLSQAKPSLPDRNDAAKDCPPDPVGPSPQDPSLEASGPSPKPAGVDISEAPQTSSPCPSADIDMKTMETAEKLARFVAQVGPEIEQFSIENSTDNPDLWFLHDQNSSAFKFYRKKVFELCPSICFTSSPHNLHTGGGDTTGSQESPVDLMEGEAEFEDEPPPREAELESPEVMPEEEDEDDEDGGEEAPAPGGAGKSEGSTPADGLPGEAAEDDLAGAPALSQASSGTCFPRKRISSKSLKVGMIPAPKRVCLIQEPKGECPPVGTVASSTVLGWWAVRVRRDRWRHFNPKEFCAPLQNVSRHSCFPVV

SEQ ID NO: 2470 - protein, 28 aa, Homo sapiens
  misc_feature (1)...(28): Xaa = any amino acid or nothing
PPRACRPCPRACPCPPTXKCSQPVSWPC

SEQ ID NO: 2471 - protein, 84 aa, Homo sapiens
  misc_feature (1)...(84): Xaa = any amino acid or nothing
PMSSLQGCFYTFKCIIFKGIFLLLISNLIAFXXEKVCSHITDSLKFIGKGWVGMVTHACNPGTLGGXGGWIAXVREFETSLGNM

SEQ ID NO: 2472 - protein, 68 aa, Homo sapiens
MNRRRFLRPADCHSGMRGTENGACSEGESQIHCGAGGEGVQLVHVVNQPENGCLQFDSTHITFSKRQN

SEQ ID NO: 2473 - protein, 138 aa, Homo sapiens
MVDRSPLLTSVIIFYLAIGAAIFEVLEEPHWKEAKKNYYTQKLHLLKEFPCLGQEGLDKILEVVSDAAGQGVAITGNQTFNNWNWPNAMIFAATVITTIGYGNVASKTPGGRLFCGFYGLFGVPFCLTWINALGKFFG

SEQ ID NO: 2474 - protein, 124 aa, Homo sapiens
  misc_feature (1)...(124): Xaa = any amino acid or nothing
GPSPSLLVLLPQEPGGTGTPVRAGAGAGMWLWEDQGGLLGPFSFLMLMLLLETRNPVNACLLTGSLFVLLGVFSFEPVPSCRALQELKPRDRISAIAHRGGRHDPPENTLGAIRQGSXXWSNRR

SEQ ID NO: 2475 - protein, 170 aa, Homo sapiens
ESSSGLLFQCFQGIHVQKLTLQARPTLFSWWLCSKPPKETGELENAESGGDGGRRGGKQDNVAWWRRMQKGDFPWDDEDFPQSGPFGGQALPMGFFYLYFRDPGREITWKHFVQYYLARGLVDRLEVVNKQSVRVIPAPGTSSEVRGEFKAEYCRHKFISCKNVVFYFFQ

SEQ ID NO: 2476 - protein, 27 aa, Homo sapiens
MEYMAESTDRSPGHILCCECGVPISPN

SEQ ID NO: 2477 - protein, 106 aa, Homo sapiens
LTGQLGSILLRVFSKSRAGLGARKLKAYRTMEYMAESTDRSPGHILCCECGVPISPNPAQYCVACLRSSFHIYHCIPKLFIHPFSKTSSSAFITPSHYLTFFSTIS

SEQ ID NO: 2478 - protein, 221 aa, Homo sapiens
VLKFLLLQTMDEQSQGMQGPPVPQFQPQKALRPDMGYNTLANFRIEKKIGRGQFSEVYRAACLLDGVPVALKKVQIFDLMDAKARADCIKEIDLLKQLNHPNVIKYYASFIEDNELNIVLELADAGDLSRMIKHFKKQKRLIPERTVWKYFVQLCSALEHMHSRRVMHRDIKPANVFITATGVVKLGDLGLGRFFSSKTTAAHSLVGTPYYMSPERIHDNG

SEQ ID NO: 2479 - protein, 122 aa, Homo sapiens
GTSWKIPSAAVSESSPNGAAYASGLPCGVRGPPWAGLALLPSPTLMALLRRPTVSSDLDNIDTRATTKIRVVATITRARIEDMRHSATALTRPDATTAQIPKLPVTTVCNRRANPGIPPSVL

SEQ ID NO: 2480 - protein, 119 aa, Homo sapiens
AYLKRLPVPESITGFARLTVSEWLRLLPFLGVLALLGYLAVRPFLPKKKQQKDSLINLKIQKENPKVVNEINIEDLCLTKAAYCRCWRSKTFPACDGSHNKHNELTGDNVGPLILKKKE

SEQ ID NO: 2481 - protein, 140 aa, Homo sapiens
KELVDEKSERGRAMDPVSQLASAGTFRVLKEPLAFLRALELLFAIFAFATCGGYSGGLRLSVDCVNKTESNLSIDIAFAYPFRLHQVTFEGPTCEGKERHKLALIGDSSSSAEFFGTVAGFAFLYSLAATGVYIFFQNKY

SEQ ID NO: 2482 - protein, 284 aa, Homo sapiens
GGGRAGAGSRDMGSTDSKLNFRKAVIQLTTKTQPVEATDDAFWDQFWADTATSVQDVFALVPAAEIRAVREESPSNLATLCYKAVEKLVQGAESGCHSEKEKQIVLNCSRLLTRVLPYIFEDPDWRGFFWSTVPGAGRGGQGEEDDEHARPLAESLLLAIADLLFCPDFTVQSHRRSTVDSAEDVHSLDSCEYIWEAGVGFAHSPQPNYIHDMNRMELLKLLLTCFSEAMYLPPAPESWQHRTHWFSSFVSSENRHALPLFTSLLNTVCAYDPVEYGIPYNHLY

SEQ ID NO: 2483 - protein, 99 aa, Homo sapiens
GPRARVQGFSGADIVKFMALGSMYLVLTLIVAKVLRGAEPCCGPLKNRVLRPCPLPVPLPPPHPQPSRGNPVGCLPTYKVVYKLLSWPLHSNSNVYFIV

SEQ ID NO: 2484 - protein, 507 aa, Homo sapiens
MAGAGPKRRALSAPVAEEKEEAREKIMAAKRADGAAPAGEGEGVTLQGNITLLKGVAVIVVAIMGSGIFVTPTGVLKEAGSPGLALVVWAACGVFSIVGALCYAELGTTISKSGGDYAYMLDVYGSLPAFLKLWIELLIIRPSSQYIVALVFATYLLKPLFPTCPVPEEAAKLVACLCVLLLTAVNCYSVKAATRVQDAFAAAKLLALALIILLGFVQIGKGDVSNLDPNFSFEGTKLDVGNIVLALYSGLFAYGGWNYLNFVTEEMINPYRNLPLAIIISLPIVTLVYVLTNLAYFTTLSTEQMLSSEAVAVDFGNYHLGVMSWIIPVFVGLSCFGSVNGSLFTSSRLFFVGSREGHLPSILSMIHPQLLTPVPSLVFTCVMTLFYAFSKDIFSVINFFSFFNWLCVALAIIGMIWLRHRKPELERPIKVNLALPVFFILACLFLIAVSFWKTTPWSVASDFTIILSGLPVYFFGVWWKNKPKWAPPGHLSPRPSCVRSSCMVVPQ

SEQ ID NO: 2485 - protein, 123 aa, Homo sapiens
RDRLPPAYFCRPVVCVVTALDVGSPESQEMDLVAFEDVAVNFTQEEWSLLDPSQKNLYREVMQETLRNLASIGEKWKDQNIEDQYKNPRNNLRSLLGERVDENTEENHCGETSSQIPDDTLNK

SEQ ID NO: 2486 - protein, 326 aa, Homo sapiens
RRRRRSRYRRCSRFPRPGPLAVSMPHAFKPGDLVFAKMKGYPHWPARIDDIADGAVKPPPNKYPIFFFGTHETAFLGPKDLFPYDKCKDKYGKPNKRKGFNEGLWEIQNNPHASYSAPPPVSSSDSEAPEANPADGSDADEDDEGRGVMAVTAVTATAASDRMESDSDSDKSSDNSGLKRKTPALKMSVSKRARKASSDLDQASVSPSEEENSESSSESEKTSDQDFTPEKKAAVRAPRRGPLGGRKKKAPSASDSDSKADSDGAKPEPVAMARSASSSSSSSSSSDSDVSVKKPPRGRKPAEKPLPKPRGRKPKPERPPSSSSSD

SEQ ID NO: 2487 - protein, 73 aa, Homo sapiens
LFPRLECRDPVTVNCTLNLPGSKNAPTTASQVGSTWNYRGGLPHPTNFFVKTGFRCSQAGLKLRGSREPPAWA

SEQ ID NO: 2488 - protein, 554 aa, Homo sapiens
TRSVGVNTCEVGVVTEPECLGPCEPGTSVNLEGIVWHETEEGVLVVNVTWRNKTYVGTLLDCTKHDWAPPRFCESPTSDLEMRGGRGRGKRARSAAAAPGSEASFTESRGLQNKNRGGANGKGRRGSLNASGRRTPPNCAAEDIKASPSSTNKRKNKPPMELDLNSSSEDNKPGKRVRTNSRSTPTTPQGKPETTFLDQGCSSPVLIDCPHPNCNKKYKHINGLRYHQAHAHLDPENKLEFEPDSEDKISDCEEGLSNVALECSEPSTSVSAYDQLKAPASPGAGNPPGTPKGKRELMSNGPGSIIGAKAGKNSGKKKGLNNELNNLPVISNMTAALDSCSAADGSLAAEMPKLEAEGLIDKKNLGDKEKGKKANNCKTDKNPSKLKSARPIAPAPAPTPPQLIAIPTATFTTTTTGTIPGLPSLTTTVVQATPKSPPLKPIQPKPTIMGEPITVNPALVSLKDKKKKEKRKLKDKEGKETGSPKMDAKLGKLEDSKGASKDLPGHFLKDHLNKNEGLANGLSESQESRMASIKAEADKVYTFTDNAPSPSIGS

SEQ ID NO: 2489 - protein, 79 aa, Homo sapiens
TRRGQPWRRRAAAAGILPGREAAACLPSCASVTAAVSGLLVGYELGIISGALLQIKTLLALSCHEQEMGVSSLVIGALL

SEQ ID NO: 2490 - protein, 27 aa, Homo sapiens
MAQGNNYGQTSNGVADESPNMLVYRKV

SEQ ID NO: 2491 - protein, 177 aa, Homo sapiens
FVEAAVKMLGSLVLRRKALAPRLLLRLLRSPTLRGHGGASGRNVTTGSLGEPQWLRVATGGRPGTSPALFSGRGAATGGRQGGRFDTKCLAAATWGRLPGPEETLPGQDSWNGVPSRAGLGMWPWAAALVVHCYSKSPSNKDAALLEAARAQNMQEVSRNRCALLHSAAVQEYGYGN

SEQ ID NO: 2492 - protein, 103 aa, Homo sapiens
HLCFWFFVGLFLPEQQIMLFATLLRMAQGCDFALGNDFLNITTKAQATKEKLDKLDFIKIKTCCTSMDAIEKTEPLTKWTKAFVSHVSYKRLLFGICKEYSRQ

SEQ ID NO: 2493 - protein, 50 aa, Homo sapiens
GLPQQTSTIQPPGTPDGARDFTSTIQPPGAPDGARDSTSIIRMGPEIPPP

SEQ ID NO: 2494 - protein, 133 aa, Homo sapiens
KKVPGRLSEMSFSLNFTLPANTTSSPVTDCGPSLGLAAGIPLLVATALLVALLFTLIHRRRSSIEAMEESDRPCEISEIDDNPKISENPRRSPTHEKNTMGAQEAHIYVKTVAGSEEPVHDRYRPTIEMERRR

SEQ ID NO: 2495 - protein, 79 aa, Homo sapiens
METIWIYQFRLIEIGDSTVGKSCLLHRFTQGRFPGLRSPACDPTVGVDFFSRLLEIEPGKRIKLLLWDTAGQERFISIT

SEQ ID NO: 2496 - protein, 74 aa, Homo sapiens
MFTYLEGREGIKSQPKMEPHSVTRLECSGMISAHCSLNLPGTSDSPASASRVAGTTGMRHHAWLIFAFLVETGF

SEQ ID NO: 2497 - protein, 418 aa, Homo sapiens
FRRGRRGEEEKEEEEEEEEGWVNGMENSHPPHHHHQQPPPQPGPSGERRNHHWRSYKLMIDPALKKGHHKLYRYDGQHFSLAMSSNRPVEIVEDPRVVGIWTKNKELELSVPKFKIDEFYVDQVPPKQVTFAKLNDNIRENFLRDMCKKYGEVEEVEILYNPKTKKHLGIAKVVFATVRGAKDAVQHLHSTSVMGNIIHVELDTKGETRMRFYELLVTGRYTPQTLPVGELDAVSPIVNETLQLSDALKRLKDGGLSAGCGSGSSSVTPNSGGTPFSQDTAYSSCRLDTPNSYGQGTPLTPRLGTPFSQDSSYSSRQPTPSYLFSQDPAVTFKARRHESKFTDAYNRRHEHHYVHNSPAVTAVAGATAAFRGSSDLPFGTVGGTGGSSGPPFKAQPQDSATFAHTPPPAQATPAPGFR

SEQ ID NO: 2498 - protein, 339 aa, Homo sapiens
IASIQNADTMPGVGLLVSHFSTLVSRQRCPNYADPQNLTDVSIFLLLEVSGDPELQPVLAGLFLSMCLVTVLGNLLIILAISPDSHLHTPMYFFFSNLSLPDVGFTSTTVPKMIVDIQSRSRVISYAGCLTQKSLFAIFGGTEENMLLSVMAYDRFVAICHPLYHSAIMNPCFCAFLVLLSFFFLSLLDSQLHSWIVLQFTIIKNVEISNFVCDPSQLLKFACSDSIINSIFIYFHKDPERQLVLAGLFLSMCLVTVLGNLIIILDVSPDSHLPTPMYFFLSNLSLPDIGFTSTTVPKMIVDIQSHGRVIFYAGCLTQMSLFAIFGGMEERHAPECDGL

SEQ ID NO: 2499 - protein, 232 aa, Homo sapiens
MASQEKDIFIGWGTIHLFRKPQRSFFGKLLREFRLVAADRSMGRYMLFGVINLICTGFLLMWCSSTNSIALTSYTYLTIFDLFSLMTCLISYWVTLRKPSPVYSFGFERLEVLAVFASTVLAQLGALFILKESAERFLEQPEIHTGRLLVGTFVALCFNLFTMLSIRNKPFAYVSEAASTSWLQEHVADLSRSLCGIIPGLSSIFLPRMNPFVLIDLAGAFALCITYMLIEI

SEQ ID NO: 2500 - protein, 35 aa, Homo sapiens
DRSTSVTRAGVQWCSLGSLQPRTPGLLRSSCLSLP

SEQ ID NO: 2501 - protein, 67 aa, Homo sapiens
VAIKELPVLWKWSKPTRTAKEPPQTQQRAGSKTAAPPCQWSRMASEGPNIPCPGARHSDKQFLICTI

SEQ ID NO: 2502 - protein, 137 aa, Homo sapiens
KPSPLITPPAVVLPPSAVLNLVNTFSSFPQVEVQGPLCGPRKGRLAVTIPFFGLSLPKYMDHRRPPPHREIFFVFLAETGFHRASQAGPDLPTSSIPPTSAFPKCWEYRSEPQCLPGCLSFSGILLDLGTNVSLRAA

SEQ ID NO: 2503 - protein, 130 aa, Homo sapiens
HPHRPRPGFRSPARSSRPCPVLTSLLPPFPSPSPPADDLVKAGRDRKDPQVRERRLRPNPGRLGGPRPRPARARSCHQPRLTRVCPRSPPPEARAPAPAAPARGRGAPKRNRPRTDTRAPRGSSARPGNS

SEQ ID NO: 2504 - protein, 34 aa, Homo sapiens
MPCIQAQYGTPAPSPGPRDHSASDPLTPEFIKPT

SEQ ID NO: 2505 - protein, 32 aa, Homo sapiens
MEEPQSDPSVEPPLSQETFSDLWKLLSENNVL

SEQ ID NO: 2506 - protein, 79 aa, Homo sapiens
MISPSRTEGDPLPLPPEGEGQEVRGFGGGPAKEAAQRHCRASVSILRMRRPGQGSSRPARVPLRGPDSHRLREPPPSPP

SEQ ID NO: 2507 - protein, 47 aa, Homo sapiens
YERRGRSQGGGSHPAGAQPGGRAIGAGWQSKEPLWEGLQRSGSPLPG

SEQ ID NO: 2508 - protein, 143 aa, Homo sapiens
QELKQGPNPLAPSPSAPSTSAGLGDCNHRVDLSKTFSVSSALAMLQERRCLYVVLTDSRCFLVCMCFLTFIQALMVSGYLSSVITTIERRYSLKSSESGLLVSCFDIGNLVVVVFVSYFRGRRRRPRVAAVGGLLDLEGGEMI

SEQ ID NO: 2509 - protein, 91 aa, Homo sapiens
KGNQVNGNGNQLKRKHESMCPVSLTQNTVRLMEAGLPQKQAERADELFEAGLVIYVKLDERVLNALYSSVGLQWFKESDLSHLRLLEISFR

SEQ ID NO: 2510 - protein, 143 aa, Homo sapiens
FVGRPRGLSDRLEDLFLAGFRVGERLRTAAMKRYVRILLLGEGAEHVADPVPGGRGVPRGEADHTDQELREEIHKANVERVVHDVSQEATIEKIRTKWIPLVRWGDHAEGPVGIKSYLPSGRSMEAELPIMSQLTEIETCVEC

SEQ ID NO: 2511 - protein, 130 aa, Homo sapiens
NSRVDDFVAPGLSEAGKLLGLEFPERQRLAAAVGCSPMSGVISMSAPFFLGKIIDAIYTNPTVDYSDNLTRLCLGLSGVFLCGAAANAIRVYLMQTSRQRVVKRLRTSLFSSILGQEVAFSDKAGTGELI

SEQ ID NO: 2512 - protein, 251 aa, Homo sapiens
QGRFRAFCWQRDFLQPPGMRLSALLALASKVTLPPHYRYGMSPPGSVADKRKNPPWIRRRPVVVEPISDEDWYLFCGDTVEILEGKDAGKQGKVVQVIRQRNWVVVGGLNTHYRYIGKTMDYRGTMIPSEAPLLHRQVKLVDPMDRKPTEIEWRFTEAGERVRVSTRSGRIIPKPEFPRADGIVPETWIDGPKDTSVEDALERTYVPCLKTLQEEVMEAMGIKETRNTRRSIGIEPGAEQLLPNFCPSLEG

SEQ ID NO: 2513 - protein, 117 aa, Homo sapiens
DSLALSPRLECSGAISAHCNLTPPGFTPFSCLSLPSSWAYRCASPHPDNFFVFLVESGFHHVGQAGLKLLISSDPPTSAFPKCWDYRRDSSAPATFSSYQRNNPDLILNDTIMPNIK

SEQ ID NO: 2514 - protein, 365 aa, Homo sapiens
SSFPTCMRTVFHSNTSVSSLLHRPGHVTPQLTIHGGWRHHRDHTAIDEWDFNPSKFLIYTCLLLFSVLLPLRLDGIIQWSYWAVFAPIWLWKLLVVAGASVGAGVWARNPRYRTEGEACVEFKAMLIAVGIHLLLLMFEVLVCDRVERGTHFWLLVFMPLFFVSPVSVAACVWGFRHDRSLELEILCSVNILQFIFIALKLDRIIHWPWLVVFVPLWILMSFLCLVVLYYIVWSLLFLRSLDVVAEQRRTHVTMAISWITIVVPLLTFEVLLVHRLDGHNTFSYVSIFVPLWLSLLTLMATTFRRKGGNHWWFAIRRDFCQDQLPQPTGKPPPPPLTDHHGEKALPLQNKDRGSWPASRGSPRLL

SEQ ID NO: 2515 - protein, 147 aa, Homo sapiens
DVSIGPPLLRRPCSGREQTRSLSFPSDPESSFSPVPEGVRLADGPGHCKGRVEVKHQNQWYTVCQTGWSLRAAKVVCRQLRCGRAVLTQKRCTKHAYGRKPIWLSQMACSGPEPTLHDCPFRPLGEDTLFHVEYTSVHGRERLSAKD

SEQ ID NO: 2516 - protein, 62 aa, Homo sapiens
PPILRWTPPSGKNFFFFFFFESEFYSSPRVECSGAISAHLAHCNLCLPGSSDSPASAFQVAS

SEQ ID NO: 2517 - protein, 127 aa, Homo sapiens
AVLTPCLSPCSPSRIPRPSRPYPGRRSLSHTPPPRPLILYAPAPRPAGTAFIPHSHPPPPDLLRPTATPATPCPSLPPPPRPLHPTQPSTALLPDPPPWPLPFPPPSSRPPRPDCSTSYSPTFPPPT

SEQ ID NO: 2518 - protein, 166 aa, Homo sapiens
MMLSEETSAVRPQKQTRFNGAKLVWMLKGSPITVTSAVIIVLMLLMMIFSPWLATHDPNAIDLTARLLPPSAAHWFGTDEVGRDLFSRVLVGSQQSILAGLVVVATTGMIGSPLECLFGELGGRADAIFMRVMDIMRSIPSLVLTMEKTAALGPSLFNAMQASSEH

SEQ ID NO: 2519 - protein, 122 aa, Homo sapiens
GNGRVAPRDPGAVASAEPGLTTHDSGVNPNNSARRMEAMASGSNWLSGVNVVLVMAYWSLVFVLLFIFAKRQIMRFAMKSLRGPHGPVGHNAPKDLKEEIDILLSRVHNIKYEPHLLADDDA

SEQ ID NO: 2520 - protein, 333 aa, Homo sapiens
GVSGFSASVLRQRRMEDELEPSLRPRTQIQGRILLLTICAAGIGGTFQFGYNLSIINAPTLHIQEFTNETWQARTGEPLPDHLVLLMWSLIVSLYPLGGLFGALLAGPLAITLGRKKSLLVNNIFVVSAAILFGFSRKAGSFEMIMLGRLASWGVNAGVSMNIQPMLPGGESAPKELRGAVAMSSAIFTALGIVMGQVVGLSTTAATGLRGLAGELEELEEERAACQGCRARRPWELFQHRALRRQVTSLVVLGSAMELCGNDSVYAYASSVFRKAGVPEAKIQYAIIGTGSCELLTAVVSVSLEGALPPPALWGGTPRSFALNQFTLQKKKK

SEQ ID NO: 2521 - protein, 137 aa, Homo sapiens
RGPASAQEDERARTAPLERVRARGRMTTSSALFPSLLPCSWSTSNKYLAEFRAGKMSLKGTTETPDKRKGLAYIQQTDDSLIHFCWKDRTSGNVEDDLIIFPDDCEFKRLPQCPNGRVYVLKFKAGSKRLFFWMQEP

SEQ ID NO: 2522 - protein, 111 aa, Homo sapiens
GWNGRSTEASPAAEAPHVPHKETKAAMGTQCTHGGKVRPDPHDMLTTVVHKIKLFVLCHSLLQLCAIMISDYLKSSIYTVEKRLGLFRPTSGLLASFNEVGNTALIVLESY

SEQ ID NO: 2523 - protein, 114 aa, Homo sapiens
  misc_feature (1)...(114): Xaa = any amino acid or nothing
LCQCIVPGQQKETFSLNPSSATVRFYLXLSLQQRKEDQXIILXYHLNKDCLHIFMSAITLYMKIXKIFVLFDFNIMFETPFYIIXFIFLFSQNLKRIRQVIRPPISFSKINNGP

SEQ ID NO: 2524 - protein, 99 aa, Homo sapiens
  misc_feature (1)...(99): Xaa = any amino acid or nothing
ERLEIGRLGGERGSGPASCLRVIDVSGMWDQRLVKLALLQLLRAFYGIKVKGVRVHRDCGTFESSSTLIRVSXFGVPCNALAHFGVTHFXYILDFLGML

SEQ ID NO: 2525 - protein, 110 aa, Homo sapiens
  misc_feature (1)...(110): Xaa = any amino acid or nothing
HESSRADRDKMDTRGSTYTDADPVNKSGGTAKMNKWSKGKVRDKLNNLVLFDTATYDKLCKEVPNYKLITLAVVSERLKIPGSLARAALHELLSRGLIXLVIQHIAQVIY

SEQ ID NO: 2526 - protein, 99 aa, Homo sapiens
  misc_feature (1)...(99): Xaa = any amino acid or nothing
LDLTHVLSLSISLTVTILGTTFGMVIPLLDVVYGERGYAQNGDFXDAQLDDYSFSCYSHAQVNGAPNSLTRAYDDPXVKISGLECQKVGALVEVKCLNL

SEQ ID NO: 2527 - protein, 133 aa, Homo sapiens
  misc_feature (1)...(133): Xaa = any amino acid or nothing
CNFLRSSRIRVHSTPAASTMPPKVDPNEIKVVYLRCTGGEVRATSALAPKIGPLGLSSIKVGVDFVXATGDWNVLIISVILTIRILLSHIFVVPPFFCFDHLIAFWDLQSLIFLHVIFSLFITLLLFCFFSIF

SEQ ID NO: 2528 - protein, 95 aa, Homo sapiens
  misc_feature (1)...(95): Xaa = any amino acid or nothing
TPLFDLWPRVVLSWLETVLTSLRTRRAASGPPACRIMPTTVDDVLEHGGEVHFLQKQMLYLLALIXDTFAPIYVGIVFLGFTPDHRCRSPGVAEL

SEQ ID NO: 2529 - protein, 68 aa, Homo sapiens
  misc_feature (1)...(68): Xaa = any amino acid or nothing
LSSAGTKMNLNXKNYWPGASAHACNPSTLGGQSRCITRSGDRDHPGXHGETPSVLKIQKISRAWWRAP

SEQ ID NO: 2530 - protein, 66 aa, Homo sapiens
  misc_feature (1)...(66): Xaa = any amino acid or nothing
HRPQTTRPDWKPRTXPQGKXGRLSSEISPASPPSRFSRSTKPVPPKADPPARQKLTGVLHAPLLKL

SEQ ID NO: 2531 - protein, 90 aa, Homo sapiens
  misc_feature (1)...(90): Xaa = any amino acid or nothing
PIAASLRMYNLQPYTEENLICTAFATMVETVPIARTILDRLTGIPHGYCFVEXADWATADKCVHIYNGKPLPGATPLLSLQLHQLAHLGS

SEQ ID NO: 2532 - protein, 78 aa, Homo sapiens
  misc_feature (1)...(78): Xaa = any amino acid or nothing
VDKCSSKSIVLSEYCPHCMCSLSTDPKPFGQLSMILKXMGAGDEKISAMGKARVDHRELYLGLLYPTEDYKLTFRARH

SEQ ID NO: 2533 - protein, 126 aa, Homo sapiens
  misc_feature (1)...(126): Xaa = any amino acid or nothing
LKDFQPWALHDWPLFCCCTFLLFLVLECFTRKGCSGWAPWLSLQCQHFGRPRWADHLRSGVRDQPGQYSKTTFLPKIQKLAGHSGAHLXSXLLERMRWKNRLNPGGRSCSEPRWHHCTPGWATERG

SEQ ID NO: 2534 - protein, 88 aa, Homo sapiens
  misc_feature (1)...(88): Xaa = any amino acid or nothing
LSGFKSLMPKIPLQYIYVRVRTTWSFCLPLDGRKLMLSXYSKXLTXKYNILPEYSRMTLPPGMVIHTCNPSTLGGRAGWIVXAQEFET

SEQ ID NO: 2535 - protein, 117 aa, Homo sapiens
  misc_feature (1)...(117): Xaa = any amino acid or nothing
RCPMWQGQASRMDPAKAKDREASTCCSLAWWWGWECWVRALKLSSGPAGPLACWVAKKKSLSLSGPVYPSEKGAGLYVFXDRVSLCHPGWSAVVQFWLTAASNSCFSLLSSWDYRCA

SEQ ID NO: 2536 - protein, 59 aa, Homo sapiens
  misc_feature (1)...(59): Xaa = any amino acid or nothing
HIPQLHTKTHYVPTRMVNKIXQIDNSKPWQRGGXTGILTHCWXESKLVQPLWKIVWHYQ

SEQ ID NO: 2537 - protein, 128 aa, Homo sapiens
  misc_feature (1)...(128): Xaa = any amino acid or nothing
EVAPGPSQILPRRVTDGGDRPQFSLPGPRLPQSSRGAEPCLSNCIHSPAPRKQRMGDSDQXSTPNPASPHPEAPQEPWDSASGSVGSFSLGRGAKASSXVPGKGRGPRQGSELLAETILELFLALANS

SEQ ID NO: 2538 - protein, 91 aa, Homo sapiens
  misc_feature (1)...(91): Xaa = any amino acid or nothing
TMDKKNRHGNSLDMASEIHMTGPMCLIENTTGRLMANPEALKILSAITQPMVEEAIAGLYRACXFYLTNNLAGMKKGLCLGSTEQAHTIGI

SEQ ID NO: 2539 - protein, 62 aa, Homo sapiens
  misc_feature (1)...(62): Xaa = any amino acid or nothing
GHVQSQHFGRPRRADHLRSGDRDHPGXHDETPSLLKIQKISWAWWRAPVVPATWEAEAEEWR

SEQ ID NO: 2540 - protein, 125 aa, Homo sapiens
  misc_feature (1)...(125): Xaa = any amino acid or nothing
VTVGLTLLLRGAPRFTAGXPPSGGGPPLAPLLPRQHCTLQTHRHLHPEAPVKVXKTXRLFPGLRGASSCRRRRCNPVLAARKAGSPRSHSTRENCRRSRCPDTAHRRRRRGRRRNPSCVRSPRWR

SEQ ID NO: 2541 - protein, 137 aa, Homo sapiens
  misc_feature (1)...(137): Xaa = any amino acid or nothing
LADALCLSAAATGAVRPGARAQPSTRRRLSPSVRVCCRAAAASNLLYSSCLQRHSERASEEGERGSLSAKCCSLVLRGGCSSSNSHSFRRITXEIMAAFVLLSYEQRPLKRPRLGPPDVYPPDPKQKEEELTAVNVK

SEQ ID NO: 2542 - protein, 76 aa, Homo sapiens
  misc_feature (1)...(76): Xaa = any amino acid or nothing
VSFLSMSSGHCIRSTRGSKMVSWSVIAKIQEIXCEEDERKMAREFLAEFMSTYVMMNIHMIVEKDTYSDHEEINTS

SEQ ID NO: 2543 - protein, 62 aa, Homo sapiens
  misc_feature (1)...(62): Xaa = any amino acid or nothing
IAKSQXKRWQRSGAMETLKHGWWECKLVQFFGKTFVNVNXSXTYVYPCDKIILLLGLYPTEM

SEQ ID NO: 2544 - protein, 125 aa, Homo sapiens
  misc_feature (1)...(125): Xaa = any amino acid or nothing
PLQRSKCLTLRCLRAKPWAWSQSPRACSSALLKSSRSRASSLNVQCILQSNPQGHQRIXKQKASSKGQQFRRXKEHPFMLKTLNKLRIEGTXLKIRRAIYDNPTANIIVEGQKLEAFPLRTGTRQ

SEQ ID NO: 2545 - protein, 209 aa, Homo sapiens
  misc_feature (1)...(209): Xaa = any amino acid or nothing
GHGAPSFQTQVPRTPXASWPVVPAASESAPAPAGGGASLPVAAGSCAAAPHTEPGAPQHLLDCPCPLCLARPPRRPLPDTCYGPGSGRSASLAEPPLPRCSCAPLRSASAPQVSXCVXAVNLLPHNLXPLHLLLHDXEKAWGFLFSSASHCFQGQICLLPAPGSGPCGATARPSRGGRAGGSRARRPIPPGPGTRRTPSGCQNPAASGG

SEQ ID NO: 2546 - protein, 80 aa, Homo sapiens
  misc_feature (1)...(80): Xaa = any amino acid or nothing
RSPTATPAPHAMGPGAPFARGGRPLPLLGAMAERVAPGWDLHTPYLPRTNSRRTPHLXXEPHAGYIGALFPMSGGWPGGQ

SEQ ID NO: 2547 - protein, 80 aa, Homo sapiens
  misc_feature (1)...(80): Xaa = any amino acid or nothing
IAWLSGLFFPSNQANLCFLCYKLTADSRYRGHAMRHLTGNTSMAIRFLXADSRFQVQRARYEAPNWKYKYGYXIPVDMLC

SEQ ID NO: 2548 - protein, 68 aa, Homo sapiens
  misc_feature (1)...(68): Xaa = any amino acid or nothing
KNKKTTKCLSIVTLNISGPNQXNKRHRVAEWIVKQEPNICHLXETHFPFRDTYRLKEREQKKRKSSYS

SEQ ID NO: 2549 - protein, 53 aa, Homo sapiens
  misc_feature (1)...(53): Xaa = any amino acid or nothing
GGRFKESKLTNAGWQRNSFFIGPPKSIPWAAVXQRGDGKNPGVTHLNRPVGTX

SEQ ID NO: 2550 - protein, 62 aa, Homo sapiens
  misc_feature (1)...(62): Xaa = any amino acid or nothing
VNAEKEFXKIQHYFMTKSQNKLHIEHTYLKPIKAIYDKWTSDIMLNLQKLXAFFLRVIVRQI

SEQ ID NO: 2551 - protein, 196 aa, Homo sapiens
  misc_feature (1)...(196): Xaa = any amino acid or nothing
SSVVEFPRGPRSSLPPLDSTFPCGSSPNWTGGCGSCPSGEXLVSPGSEQRKKYSNSNVIMHETSQYHVQHLATFIMDKSEAITSVDDAIRKLVQLSSKEKIWTQEMLLQVNDQSLRLLDIESQEELEDFPLPTVQRSQTVLNQLRYPSVLLLVCQDSEQSKPDVHFFHCDEVEAELVHEYMESALTDCRLGKAMRP

SEQ ID NO: 2552 - protein, 142 aa, Homo sapiens
  misc_feature (1)...(142): Xaa = any amino acid or nothing
KYGNEGHWSRQCPNPGKPIRPCPLCRGPHWKLDCERPPQGPLPSLPELAKTSYSDLTGLATEDXWGPGMDAPATTIASSKTRVTLMVAGRPVFFLIXYRATYSALPNFSGPTQSSQVSVVGIDGQVSKPRATPPLFCSLHTF

SEQ ID NO: 2553 - protein, 74 aa, Homo sapiens
  misc_feature (1)...(74): Xaa = any amino acid or nothing
RRKFERKQKQXRYREGKQYRQRDKMKEWGEKEKRRREKGEREERKMRHRERKGESGQRDTMENWRVERLTEKER

SEQ ID NO: 2554 - protein, 111 aa, Homo sapiens
  misc_feature (1)...(111): Xaa = any amino acid or nothing
EDKRLRLVDGDSRCAGRVXIYHDGFWGTICDDGWDLSDAHVVCQKLGCGVAFNATVSAHFGEGSGPIWLDDLNCTGTESHLWQCPSRGWGQHDCRHKEDAGVICSEFTALR

SEQ ID NO: 2555 - protein, 120 aa, Homo sapiens
  misc_feature (1)...(120): Xaa = any amino acid or nothing
ARGSCPTRPRTANGRMGETKDAPQMLVTFKDVAVTFFREEWRQLVLVHRTLYRXGMLETCGLLDTLRHNVPQPDVVHLLYHGTQLLIVKREVSHSPCAGDMRELFTREATLTPHPYNNGA

SEQ ID NO: 2556 - protein, 146 aa, Homo sapiens
  misc_feature (1)...(146): Xaa = any amino acid or nothing
TLGAVLFSEVSKESSTSHSGGQLGRQNRHPKLSNFITPSSPRLKPXTASSQRNLGQILNMFLTAVNPQPLSTPSWQIETKYSTKVLTGNWMEERRKGLPYKHLITHHQEPPHRYLISTYDDHYNRHGYNPGLPPLRTWNGQKLLWL

SEQ ID NO: 2557 - protein, 137 aa, Homo sapiens
  misc_feature (1)...(137): Xaa = any amino acid or nothing
LRSSPAALLRALCITTVTGTALALRSRVATTNPDGCRNVLRPKYYRLCDKAESWGIALETVPTGVAVTSWAIMLTVLTLVCKGQDYNRRQKLPTHILCLLXEKGIFGLTFAFIIGLDGSTGPTRFFLFGILFSICFS

SEQ ID NO: 2558 - protein, 39 aa, Homo sapiens
  misc_feature (1)...(39): Xaa = any amino acid or nothing
IKNYWPGMVAHACNPSPLGGRGRWIAXAQKFADAWADAW

SEQ ID NO: 2559 - protein, 137 aa, Homo sapiens
  misc_feature (1)...(137): Xaa = any amino acid or nothing
KSLRNVWDLLNNTWKADRFFCHSSRTSTIRKGDPGPTFSKMSIWTSGRTSSSYRHDEKRNIYQRIRDHDLLDKRKTVTALKAGEDRAILLGLAMMVCSIMMXFLLGITLLRSYMQSVWTRESQCTLLNASITETFNC

SEQ ID NO: 2560 - protein, 127 aa, Homo sapiens
  misc_feature (1)...(127): Xaa = any amino acid or nothing
SLHDMLMLAEQQQKQKWAVNTQNTAWSNADSKFGQRILEKMEWSKGRGLGVQEQGGPDDIKVQVKNNDLGLQATINNEANWIAHQDDFNWLLAELNTCQRQETADSXXXWSPKNSHVGKDSGELSAK

SEQ ID NO: 2561 - protein, 124 aa, Homo sapiens
  misc_feature (1)...(124): Xaa = any amino acid or nothing
QKHPGGGQLGRSPQEDSRFHNKASSGVSRVRLGRAWWLTPVIPTLWEAKAGGSPEXDXAGRGGSRLXSQHFGRPRRVDHLRSAVQDQPGQHGETPSLLKIQKINXVWGRRLXSSYSEAEAGESL

SEQ ID NO: 2562 - protein, 105 aa, Homo sapiens
  misc_feature (1)...(105): Xaa = any amino acid or nothing
QFPVDGDYQKIEKITQLFQAQNLSLCLAMTRTRELXKGGGKGRHEXAVVPFLKKGGYGVKAPAILNTSNCTXCFXETKMLSDDPKACVFEVSSADLXNTSFGVIR

SEQ ID NO: 2563 - protein, 118 aa, Homo sapiens
  misc_feature (1)...(118): Xaa = any amino acid or nothing
AELSLASTACGRNTSGDSLPDYDRAPISSPLATSGTILSAISCLWDLPTPVLRVGLSCQPSMSSQIPRMYSTDVEAAVNSLEDLYLQAYYAYLCVGLYFHRDDMALEGVSRFLXELAE

SEQ ID NO: 2564 - protein, 45 aa, Homo sapiens
  misc_feature (1)...(45): Xaa = any amino acid or nothing
SLSRWVRAKLXVPYNQENCLNPRGGGCSEPRSHYCTPAWATEKDS

SEQ ID NO: 2565 - protein, 65 aa, Homo sapiens
  misc_feature (1)...(65): Xaa = any amino acid or nothing
KPGNFAVSSEYXDITSGQLKTAVRGXIEMTSTEENFGEKLHDIGFGNGFLDKTXKAQATKAKIDK

SEQ ID NO: 2566 - protein, 105 aa, Homo sapiens
  misc_feature (1)...(105): Xaa = any amino acid or nothing
CFLEDGCTQASXAEEAAVSPSMAEEEQGSTSCRERRSIRFKMKNHSPDDTIKENVTISNIRTRKINHLPETERNLLEHGLMYIRLNAAFCSLVAHSLFGFILKAT

SEQ ID NO: 2567 - protein, 141 aa, Homo sapiens
  misc_feature (1)...(141): Xaa = any amino acid or nothing
LHCKMGALETQTHPCSQNMLRSLQKCCCKVEEHHLQPVQVLQTLLHSATAGTGCRRPARPPPAPPTPTPWRSRQSGKQSERASXLKGRGRYGLGALGGRGGRALGGSRWPPPLPGETLFSGCKHRRRRRGSDAAPGEEAGT

SEQ ID NO: 2568 - protein, 134 aa, Homo sapiens
  misc_feature (1)...(134): Xaa = any amino acid or nothing
HASARALLSPNLSPNNKMAISGGPVLGFFIIAVLMSAQEPWAIKEEHVIIQAEFYLNPDQSGEFMLDFEGEDTFHGDMAKKETVWRLEXLARLDNFEAQRALANIAADQAALEIMDMGSDYTLIPNVPPKVTVL

SEQ ID NO: 2569 - protein, 94 aa, Homo sapiens
PDWTEKRKMQDTGSILPLHWFGFGYAALVAYGGIIGYVKAGSVPSLAAGLLFGSLSGLGAYQLSQDPRNVWVFLATSGTLAGIMGMRFYHSGKL

SEQ ID NO: 2570 - protein, 166 aa, Homo sapiens
LLLTGYIQTLQNQQLSGNQQEMQAVDNLTSAPGNTSLCTRDYKITQVLFPLLYTVLFFVGLITNGLAMRIFFQIRSKSNFIIFLKNTVISDLLMILTFPFKILSDAKLGTGPLRTFVCQVTSVIFYFTMYISISFLGLITIDRYQKTTRPFKTSNPKNLLGAKILK

SEQ ID NO: 2571 - protein, 133 aa, Homo sapiens
KERDSSTFSAAMTTMQGMEQAMPGAGPGVPQLGNMAVIHSHLWKGLQEKFLKGEPKVLGVVQILTALMSLSMGITMMCMASNTYGSNPISVYIGYTIWGSVMFIISGSLSIAAGIRTTKGLVRGSLGMNITSS

SEQ ID NO: 2572 - protein, 123 aa, Homo sapiens
VAKMVKCCSAIGCASRCLPNSKLKGLTFHVFPTDENIKRKWVLAMKRLDVNAAGIWEPKKGDVLCSRHFKKTDFDRSAPNIKLKPGVIPSIFDSPYHLQGKREKLHCRKNFTLKTVPATNYNH

SEQ ID NO: 2573 - protein, 85 aa, Homo sapiens
RTSMGILYSEPICQAAYQNDFGQVWRWVKEDSSYANVQDGFNGDTPLICACRRGHVRIVSFLLKKECLCQPQKPERENLLALCCE

SEQ ID NO: 2574 - protein, 210 aa, Homo sapiens
DAWASGGELGSLFDHHVQRAVCDTRAKYREGRRPRAVKVYTINLESQYLLIQGVPAVGVMKELVERFALYGAIEQYNALDEYPAEDFTEVYLIKFMNLQSARTAKRKMDEQSFFGGLLHVCYAPEFETVEETRKKLQMRKAYVVKTTENKDHYVTKKKLVTEHKDTEDFRQDFHSEMSGFCKAALNTSAGNSNPYLPYSCELPLCYFSSK

SEQ ID NO: 2575 - protein, 54 aa, Homo sapiens
RSGCVLRMTEWETGAPAVAETPDIKLFGKWSTDDVHINDISLQDYIAGVRLILL

SEQ ID NO: 2576 - protein, 137 aa, Homo sapiens
QGLPSFLPAFGPSGSWLGPAPTLGSSCNTVDTICHGYSEIRPLFYLSFCDLLLGLCWLTETLLYGASVANKDIICYNLQAVGQIFYISSFLYTVNYIWYLYTELRMKHTQSGQSTSPLVIDYTCRVCQMAFVFSSLI

SEQ ID NO: 2577 - protein, 138 aa, Homo sapiens
GKWKRTQVPLLGEECADMDLARKEFLRGNGLAAGKMNISIDLDTNYAELVLNVGRVTLGENNRKKMKDCQLRKQQNENVSRAVCALLNSGGGVIKAEVENKGYSYKKDGIGLDLENSFSNMLPFVPNFLDFMQNGNYF

SEQ ID NO: 2578 - protein, 44 aa, Homo sapiens
EASSSNTVASNVADKTDPHSMNSRVFIGNLNTLVLQKSDVEAVF

SEQ ID NO: 2579 - protein, 260 aa, Homo sapiens
LFAMSGFENLNTDFYQTSYSIDDQSQQSYDYGGSGGPYSKQYAGYDYSQQGRFVPPDMMQPQQPYTGQIYQPTQAYTPASPQPFYGNNFEDEPPLLEELGINFDHIWQKTLTVLHPLKVADGSIMNETDLAGPMVFCLAFGATLLLAGKIQFGYVYGISAIGCLGMFCLLNLMSMTGVSFGCVASVLGYCLLPMILLSSFAVIFSLQGMVGIILTAGIIGWCSFSASKIFISALAMEGQQLLVAYPCALLYGVFALISVF

SEQ ID NO: 2580 - protein, 78 aa, Homo sapiens
TFVLNMNTPKEEFQDWPIVRIAAHLPDLIVYGHFSPERPFMDYFDGVLMFVDISGKCKRDVCLMWMSNRLAWEFTCRA

SEQ ID NO: 2581 - protein, 354 aa, Homo sapiens
TPLFDFWPGFVLSWLQPLSASLRARRAASGPPACRIMPTTVDDVLEHGGEFHFFQKQMFFLLALLSATFAPIYVGIVFLGFTPDHRCRSPGVAELSLRCGWSPAEELNYTVPGPGPAGEASPRQCRRYEVDWNQSTFDCVDPLASLDTNRSRLPLGPCRDGWVYETPGSSIVTEFNLVCANSWMLDLFQSSVNVGFFIGSMSIGYIADRFGRKLCLLTTVLINAAAGVLMAISPTYTWMLIFRLIQGLVSKAGWLIGYILITEFVGRRYRRTVGIFYQVAYTVGLLVLAGVAYALPHWRWLQFTVALPNFFFLLYYWCIPESPRWLISQNKNAEAMRIIKHIAKKNGKSLPASL

SEQ ID NO: 2582 - protein, 118 aa, Homo sapiens
PGPGMQGPPPITPTSWSLPPWRAYVAAAVLCYINLLNYMNWFIIAGVLLDIQEVFQISDNHAGLLQTVFVSCLLLSAPVFGYLGDRHSRKATMSFGILLWSGAGLSSSFISPRYSWLF

SEQ ID NO: 2583 - protein, 131 aa, Homo sapiens
LPAPWTERVRKSEGLVGTCLGDPMASPRTVTIVALSVALGLFFVFMGTIKLTPRLSKDAYSEMKRAYKSYVRALPLLKKMGINSILLRKSIGALEVACGIVMTLVPGRPKDVANFFLLLLVLAVLFFHQLV

SEQ ID NO: 2584 - protein, 128 aa, Homo sapiens
RLELDWGFSLHFLPVAYLCPLSSGFEMNVQPCSRCGYGVYPAEKISCIDQIWHKACFHCEVCKMMLSVNNFVSHQKKPYCHAHNPKNNTFTSVYHTPLNLNVRTFPEAISGIHDQEDGEQCKSVFHWD

SEQ ID NO: 2585 - protein, 169 aa, Homo sapiens
IRSGAMSVDKAELCGSLLTWLQTFHVPSPCASPQDLSSGLAVAYVLNQIDPSWFNEAWLQGISEDPGPNWKLKVTSGLLIRGQTGEEMTRDGPARHMSWVMGRKRDRCLVINHLFIHSSMEYSPCARPGHSARNNTDKNLPHTAIILVTSNTYTTIKINFQAGRSGSCL

SEQ ID NO: 2586 - protein, 85 aa, Homo sapiens
FRGEALTVRFLTKRFIGEYASNFESIYKKHLCLERKQLNLEIYDPCSQTQKAKFSLTSELHWADGFVIVYDISDRSSFAFAKALI

SEQ ID NO: 2587 - protein, 83 aa, Homo sapiens
NILAIIYFPFPRLFLLRDSQSNPKAFALTLCHHQKIKNFQILPVSIDALTPPLVVCFLVSFLTHFSRYKPTRPVCITQFQGCS

SEQ ID NO: 2588 - protein, 143 aa, Homo sapiens
ELGAGRSDREAMEAAVKEEISVEDEAVDKNIFRDCNKIAFYRRQKQWLSKKSTYRALLDSVTTDEDSTRFQIINEASKVPLLAEIYGIEGNIFRLKINEETPLKPRFEVPDVLTSKPSTVRLISCSGDTGSLILADGKGDLKC

SEQ ID NO: 2589 - protein, 145 aa, Homo sapiens
VPGDPAMVRAGAVGAHLPASGLDIFGDLKKMNKRQLYYQVLNFAMIVSSALMIWKGLIVLTGSESPIVVVLSGSMEPAFHRGDLLFLTNFREDPIRAGEIVVFKVEGRDIPIVHRVIKVHEKDNGDIKFLTKGDNNEGDDRGSYK

SEQ ID NO: 2590 - protein, 100 aa, Homo sapiens
TDGRDPLPCAARRRGGGGECCGAGWVAEWSPQPLDPAMLLWMQGFVLEAVACQDNDDYLRYGILFEDLDCNGDGVVDIIELQEGLRNWSSAFDPNSEEHG

SEQ ID NO: 2591 - protein, 123 aa, Homo sapiens
SPARGKSNRTDVMITAPKNKKMTENLAAPEALDSSTHSSSTATQSRAKMNTPAPTPSTVPAIPRGGSGGPPPCAPHDRVSSVLQCDTQAMDHKTESSHSVVEFLFKRTKTPSPFHPAVRENRN

SEQ ID NO: 2592 - protein, 195 aa, Homo sapiens
TISCGPATEPPASLLSSASSDDFCKEKTEDRYSLGSSLDSGMRTPLCRICFQGPEQGELLSPCRCDGSVKCTHQPCLIKWISERGCWSCELCYYKYHVIAISTKNPLQWQAISLTVIEKVQVAAAILGSLFLIASISWLIWSTFSPSARWQRQDLLFQICYGMYGFMDVMIVAVDSEDMVQAAKEVGKRWSDIPP

SEQ ID NO: 2593 - protein, 71 aa, Homo sapiens
WRISHHAGKMPVMKGLLAPQNTFLDTIATRFDGTHSNFILANAQVAKGFPIVYCSDGFCELAGFARTEVMQ

SEQ ID NO: 2594 - protein, 178 aa, Homo sapiens
PICGFLYLCSAMASESSPLLAYRLLGEEGVALPANGAGGPGGASARKLSTFLGVVVPTVLSMFSIVVFLRIGFVVGHAGLLQALAMLLVAYFILALTVLSVCAIATNGAVQGGGAYCILQHRWTGVWPVLPAREVMISRTLGPEVGGSIGLMFYLANVCGCAVSLLGLVESVLDVFGA

SEQ ID NO: 2595 - protein, 349 aa, Homo sapiens
KSKCRFPEGLSEGFGPMRKEALSSGSVQEAEAMLDEPQEQAEGSLTVYVISEHSSLLPQDMMSYIGPKRTAVVRGIMHREAFNIIGRRIVQVAQAMSLTEDVLAAALADHLPEDKWSAEKRRPLKSSLGYEITFSLLNPDPKSHDVYWDIEGAVRRYVQPFLNALGAAGNFSVDSQILYYAMLGVNPRFDSASSSYYLDMHSLPHVINPVESRLGSSAASLYPVLNFLLYVPELAHSPLYIQDKDGAPVATNAFHSPRWGGIMVYNVDSKTYNASVLPVRVEVDMVRVMEVFLAQLRLLFGIAQPQLPPKCLLSGPTSEGLMTWELDRLLWARSVENLATATTTLTSLA

SEQ ID NO: 2596 - protein, 117 aa, Homo sapiens
PPQLGAQRVREPRHPDVRAPLRVTSPGLRSRSARSLGRRPRIAMVTVGNYCEAEGPVGPAWMQDGLSPCFFFTLVPSTRMALGTLALVLALPCKRRERPAGADSLSWGAGPRISSYV

SEQ ID NO: 2597 - protein, 108 aa, Homo sapiens
FVRNKKMTRSCSAVGCSTRDTVLSRERGLSFHQFPTDTIQRSKWIRAVNRVDPRSKKIWIPGPGAILCSKHFQESDFESYGIRRKLKKGAVPSVSLYKVFKYSSRCTS

SEQ ID NO: 2598 - protein, 129 aa, Homo sapiens
RVDDFVYSKGGKDAGGADVSLACRRQSIPEEFRGITVVELIKKEGSTLGLTISGGTDKDGKPRVSNLRPGGLAARSDLLNIGDYIRSVNGIHLTRLRHDEIITLLKNVGERVVLEVEYELPPPGGCPWT

SEQ ID NO: 2599 - protein, 421 aa, Homo sapiens
LPPPRPSRHRRGRAGTRASAAAAAGPTVSAVRAPVRGQDSGAGTPQGRLAGRGAHLSRVGASGSGVAAGPAARHAPRRRCADAGEAVGASCGRCAVALLSGVCTLVSTHVCVGSGCPGAAGTPMGAGDAGASAESAVTTAPQEPPARPLQAGSGAGPAPGRAMRSTTLLALLALVLLYLVSGALVFRALEQPHEQQAQRELGEVREKFLRAHPCVSDQELGLLIKEVADALGGGADPETNSTSNSSHSAWDLGSAFFFSGTIITTIGGGGDWHVGGGKELPHGGRCRETEGSQVAPRLPASPLCPGYGNVALRTDAGRLFCIFYALVGIPLFGILLAGVGDRLGSSLRHGIGHIEAIFLKWHVPPELVRVLSAMLFLLIGCLLFVLTPTFVFCYMEDWSKLEAIYFVIVTLTTVGFGDYVA

SEQ ID NO: 2600 - protein, 217 aa, Homo sapiens
FVVPSPCGGIPGRAPNGASRPTMGNSASRNDFEWVYTDQPHTQRRKEILAKYPAIKALMRPDPRLKWAVLVLVLVQMLACWLVRGLAWRWLLFWAYAFGGCVNHSLTLAIHDISHNAAFGTGRAARNRWLAVFANLPEGVPYAASFKKYHVDHHRYLGGDGLDVDVPTRLEGWFFCTPARKLLWLVLQPFFYSLRPLCVHPKAVTRMEVLNTLVQLA

SEQ ID NO: 2601 - protein, 352 aa, Homo sapiens
PVIMPLHFSPGDIVRPSCCVSSSPKLRRNAHSRLESYRPDTDLSREDTGCNLQHISDRENIDDLNMEFNPSDHPRASTIFLSKSQTDVREKRKSLFINHHPPGQIARKYSSCSTIFLDDSTVSQPNLKYTIKCVALAIYYHIKNRDPDGRMLLDIFDENLHPLSKSEVPPDYDKHNPEQKQIYRFVRTLFSAAQLTAECAIVTLVYLERLLTYAEIDICPANWKRIVLGAILLASKVWDDQAVWNVDYCQILKDITVEDMNELERQFLELLQFNINVPSSVYAKYYFDLRSLAEANNLSFPLEPLSRERAHKLEAISRLCEDKYKDLRRSARKRSASADNLTLPRWSPAIIS

SEQ ID NO: 2602 - protein, 123 aa, Homo sapiens
KRPDSRPPAQYRAGPTRPRTRGCELLYWKATKAVGIKMGSLSTANVEFCLDVFKELNSNNIGDNIFFSSLSLLYALSMVLLGARGETEEQLEKVWNSSEVCSEPRSLSCSRSGSAKLILSLYQ

SEQ ID NO: 2603 - protein, 69 aa, Homo sapiens
KEQAELLYGLYCQCDLTLSSHPSSVPAMSSCNFTHATFVLIGIPGLEKAHFWVGFPLLSMYVAAMFGNC

SEQ ID NO: 2604 - protein, 158 aa, Homo sapiens
VISFQIITDTIMDSSTAHSPVFLVFPPEITASEYESTELSATTFSTQSPLQKLFARKMKILGTIQILFGIMTFSFGVIFLFTLLKPYPRFPFIFLSGYPFWGSVLFINSGAFLIAVKRKTTETLIILSRIMNFLSALGAIAGIILLTFEFHPRSKLHL

SEQ ID NO: 2605 - protein, 105 aa, Homo sapiens
RPGREQRDCFQAPPLGLGGRQTDMMHHPLTGATCVGLPNVGMCPQLSGALTFMYLQQGNQEATVAPDTMAQPYASAQFAPPQNGIPGEYTAPHPHPAPEYTGQTT

SEQ ID NO: 2606 - protein, 101 aa, Homo sapiens
SGGPAGLLHRPVLPKMGLSGLLPILVPFILLGDIQEPGHAEGILGKPCPKIKVECEVEEIDQCTKPRDCPENMKCCPFSRGKKCLDFRKVSLTLYHKEELE

SEQ ID NO: 2607 - protein, 28 aa, Homo sapiens
EHLKSTPNRLGVVAHTCNPSTLGGRGGW

SEQ ID NO: 2608 - protein, 537 aa, Homo sapiens
AGPGVPAVGGRWASGPGLGGRTLCSGPPDHQRRGPSCGASGDPQCVGSPHPQRARPLLARPGARLLPGHLPSPRPPRLPTGQPPAAAFRGPVRPQGGGHIHPLPTPGGRPCFAVSEGSGSALLLSYLGECGSSSYVTGAACISPVLRCREWFEAGLPWPYERGFLLHQKIALSRYATALEDTVDTSRLFRSRSLREFEEALFCHTKSFPISWDAYWDRNDPLRDVDEAAVPVLCICSADDPVCGPPDHTLTTELFHSNPYFFLLLSRHGGHCGFLRQEPLPAWSHEVILESFRALTEFFRTEERIKGLSRHRASFLGGRRRGGALQRREVSSSSNLEEIFNWKRSYTRLMAAAAGAAAAPGSREPQDRPECGAGHPGPRYYRHPERWLLRPEAFLGPLRTRAPSAEDSQRERPAARSGPEMRVRYPVVAAVLAPYLALSQDPMVKSSASGQGASGSYNHVREEMLIKAGGAMSRRVVRQSKFRHVFGQAAKADQAYEDIRVSKVTWDSSFCAVNPKFLAIIVEAGGGGAFIVLPLAK

SEQ ID NO: 2609 - protein, 81 aa, Homo sapiens
GCFKFIGESTCCWIFPSSVTTQCVVAKAPRAATLSKAERLRSQPGPEQGGSSYRPRTPTAAAILPPRPGRSHRKRKLVSTK

SEQ ID NO: 2610 - protein, 209 aa, Homo sapiens
QRSCLCSAIEKDGGDVKALYRRSQALEKLGRLDQAVLDLQRCVSLEPKNKVFQEALRNIGGQIQEKVRYMSSTDAKVEQMFQILLDPEEKGTEKKQKASQNLVVLAREDAGAEKIFRSNGVQLLQRLLDMGETDLMLAALRTLVGICSEHQSRTVATLSILGTRRVVSILGVESQAVSLAACHLLQVMFDALKEGVKKGFRGKEGAIIV

SEQ ID NO: 2611 - protein, 146 aa, Homo sapiens
GFRGAEAPGAAQAPKKKKPRPTEGGPGAGSGRGKDPYRGPTLLHQPKPPKDEFLSSLESYEIAFPTRVDHNGALLAFSPPPPQRQRRGTGATAESRLFYKEASPSTHFLLNLTRSSRLLAGHVSVEYWTREGLAWQRADRPHCLYA

SEQ ID NO: 2612 - protein, 89 aa, Homo sapiens
AAEMGRAGAAAVIPGLALLWAVGLGGPPPAPPRLPFCLQELQGRHALHTFSLERTCSYQDFLWADEGRLLHVGAQDLATWHTLSPLGLW

SEQ ID NO: 2613 - protein, 80 aa, Homo sapiens
RMSATSVDQRPKGQGNKVSVQNGSIHQKDGCNDDDFEPYLRSPDNQSNSYPPMSDPYMPGYYAPSIGFPYSLGEAAWSQL

SEQ ID NO: 2614 - protein, 72 aa, Homo sapiens
ESIGLTALGPRRRPWEHRWSDPITLKMKGWGWLALLLGALLGTAWARRSQDLHCGACKAVRRRVRQFNIYDY

SEQ ID NO: 2615 - protein, 173 aa, Homo sapiens
FVASEVSKMPVPASWPHPPGPFLLLTLLLGLTEVAGEEELQMIQPEKLLLVTVGKTATLHCTVTSLLPVGPVLWFRGVGPGRELIYNQKEGHFPRVTTVSDLTKRNNMDFSIRISSITPADVGTYYCVKFRKGSPDHVEFKSGAGTELSVRGEYSVGFLSQVWWWLSSHPFMN

SEQ ID NO: 2616 - protein, 47 aa, Homo sapiens
PKNNACHLLFTAVCQPRCKHGECIGPNKCKCHPGYAGKTCNQGRKTV

SEQ ID NO: 2617 - protein, 223 aa, Homo sapiens
LPAPASTWSVARETMASSSVPPATVSAATAGPGPGFGFASKTKKKHFVQQKVKVFRAADPLVGVFLWGVAHSINELSQVPPPVMLLPDDFKASSKIKVNNHLFHRENLPSHFKFKEYCPQVFRNLRDRFGIDDQDYLVSLTRNPPSESEGSDGRFLISYDRTLVIKEVSSEDIADMHSNLSNYHQVRPLSSPILSLSSLLTYSSAIVSNRCQLGRKLIGRENP

SEQ ID NO: 2618 - protein, 69 aa, Homo sapiens
GEGYELFVPSNGVPAVCHMVGRRPHRAVLSPSQDELEHSLGESAAQGAAGVVLWVSWENTRTKVSLGLA

SEQ ID NO: 2619 - protein, 147 aa, Homo sapiens
FGMLKNKGHSSKKDNLAVNAVALQDHILHDLQLRNLSVADHSKTQVQKKENKSLKRDTKAIIDTGLKKTTQCPKLEDSEKEYVLDPKPPPLTLAQKLGLIGPPPPPLSSDEWEKVKQRSLLQGDSVQPCPICKEEFELRPQVFSIRG

SEQ ID NO: 2620 - protein, 195 aa, Homo sapiens
RVDDFVRPLPPGLMSRSRASIHRGSIPAMSYAPFRDVRGPSTHRTQYVHSPYDRPGWNPRFCIISGNQLLMLDEDEIHPLLIRDRRSESSRNKLLRRTVSVPVEGRPHGEHEYHLGRSRRKSVPGGKQYSMEGAPAAPFRPSQGFLSRRLKSSIKRTKSQPKLDRTSSFRQILPRFRSADHDRYRGWSMWDEIDV

SEQ ID NO: 2621 - protein, 51 aa, Homo sapiens
LPAPPNLSPRLSFGFQFPGGNDNYLTITGPSHPFLSGAEVSQSCRRRGGRA

SEQ ID NO: 2622 - protein, 127 aa, Homo sapiens
SAVTISWKWRSVMGIQTSPALLASLGAGLVTLLGLAVGSYLVRRSRRPQVTLLDPNEKDLLRLIDKTLSARSPCKHIYLSTRIDGSLSIRPYTPVTSDEDQGYVDIDIKVYLKGVHPTFPEGGKMSH

SEQ ID NO: 2623 - protein, 446 aa, Homo sapiens
MAARTLGRGVGRLLGSLRGLSGQPARPPCGVSAPRRAASGPSGSAPAVAAAAAQPGSYPALSAQAAREPAAFWGPLARDTLVWDTPYHTVWDCDFSTGKIGWFLGGQLNVSVNCLDQHVRKSPESVALIWERDEPGTEVRITYRELLETTCRLANTLKRHGVHRGDRVAIYMPVSPLAVAAMLACARIGAVHTVIFAGFSAESLAGRINDAKCKVVITFNQGLRGGRVVELKKIVDEAVKHCPTVQHVLVAHRTDNKVHMGDLDVPLEQEMAKEDPVCAPESMGSEDMLFMLYTSGSTGMPKGIVHTQAGYLLYAALTHKLVFDHQPGDIFGCVADIGWITGHSYVVYGPLCNGATSVLFESTPVYPNAGRYWETVERLKINQFYGAPTAVRLLLKYGDAWVKKYDRSSLRTLGSVGEPINCEAWEWLHRVVGDSRCTLVDTWWQT

SEQ ID NO: 2624 - protein, 1250 aa, Homo sapiens
FRPQGTPRSPASHVLTMSAPDEGRRDPPKPKGKTLGSFFGSLPGFSSARNLVANAHSSARARPAADPTGAPAAEAAQPQAQVAAHPEQTAPWTEKELQPSEKMVSGAKDLVCSKMSRAKDAVSSGVASVVDVAKGVVQGGLDTTRSALTGTKEVVSSGVTGAMDMAKGAVQGGLDTSKAVLTGTKDTVSTGLTGAVNVAKGTVQAGVDTTKTVLTGTKDTVTTGVMGAVNLAKGTVQTGVETSKAVLTGTKDAVSTGLTGAVNVARGSIQTGVDTSKTVLTGTKDTVCSGVTGAMNVAKGTIQTGVDTSKTVLTGTKDTVCSGVTGAMNVAKGTIQTGVDTSKTVLTGTKDTVCSGVTGAMNVAKGTIQTGVDTTKTVLTGTKNTVCSGVTGAVNLAKEAIQGGLDTTKSMVMGTKDTMSTGLTGAANVAKGAMQTGLNTTQNIATGTKDTVCSGVTGAMNLARGTIQTGVDTTKIVLTGTKDTVCSGVTGAANVAKGAVQGGLDTTKSVLTGTKDAVSTGLTGAVNVAKGTVQTGVDTTKTVLTGTKDTVCSGVTSAVNVAKGAVQGGLDTTKSVVIGTKDTMSTGLTGAANVAKGAVQTGVDTAKTVLTGTKDTVTTGLVGAVNVAKGTVQTGMDTTKTVLTGTKDTIYSGVTSAVNVAKGAVQTGLKTTQNIATGTKNTFGSGVTSAVNVAKGAAQTGVDTAKTVLTGTKDTVTTGLMGAVNVAKGTVQTSVDTTKTVLTGTKDTVCSGVTGAANVAKGAIQGGLDTTKSVLTGTKDAVSTGLTGAVKLAKGTVQTGMDTTKTVLTGTKDAVCSGVTGAANVAKGAVQMGVDTAKTVLTGTKDTVCSGVTGAANVAKGAVQTGLKTTQNIATGTKNTLGSGVTGAAKVAKGAVQGGLDTTKSVLTGTKDAVSTGLTGAVNLAKGTVQTGVDTSKTVLTGTKDTVCSGVTGAVNVAKGTVQTGVDTAKTVLSGAKDAVTTGVTGAVNVAKGTVQTGVDASKAVLMGTKDTVFSGVTGAMSMAKGAVQGGLDTTKTVLTGTKDAVSAGLMGSGNVATGATHTGLSTFQNWLPSTPATSWGGLTSSRTTDNGGEQTALSPQEAPFSGISTPPDVLSVGPEPAWEAAATTKGLATDVATFTQGAAPGREDTGLLATTHGPEEAPRLAMLQNELEGLGDIFHPMNAEEQAQLAASQPGPKVLSAEQGSYFVRLGDLGPSFRQRAFEHAVSHLQHGQFQARDTLAQLQDCFRL

SEQ ID NO: 2625 - protein, 97 aa, Homo sapiens
TILARKKEKTCPCKKEIGRNSRSGMYSRKAMYKRKYSAANTKVEKKKKEKVLAPVTKPVGGDKNGGTRVVKLPTMPRYYPTEDVPRKLLSHGKKPFS

SEQ ID NO: 2626 - protein, 167 aa, Homo sapiens
GGSLRFSPPRVPSCSRVFCPVPPGGCGLPSPMSASRPQSPTTPWCLPRRYMKHKRDDGPEKQEDEAVDVTPVMTCVFVVMCCSMLVLLYYFYDLLVYVVIGIFCLASATGLYSCLAPCVRRLPFGKCRIPNNSLPYFHKRPQARMLLLALFCVAVSVVWGVFRNEDQ

SEQ ID NO: 2627 - protein, 273 aa, Homo sapiens
YSRFTVPLPATMASSEVARHLLFQSHMATKTTCMSSQGSDDEQIKRENIRSLTMSGHVGFESLPDQLVNRSIQQGFCFNILCVGETGIGKSTLIDTLFNTNFEDYESSHFCPNVKLKAQTYELQESNVQLKLTIVNTVGFGDQINKEERQLGRSQSTENPQKYRSEQHPVEPKKCTSFWKGALGKWAGIESSGQSAQQPYLPINSPPHRLADVADVHLFSSVLSGAFGCYHLDVTVNEFKKQQNRDEQEGYSKGDQEQGSWKHGADPLRGGEM

SEQ ID NO: 2628 - protein, 151 aa, Homo sapiens
RAFDVRRKKSLRPCCPRDFHAGCLTVSGPSTVMGAVGESLSVQCRYEEKYKTFNKYWCRQPCLPIWHEMVETGGSEGVVRSDQVIITDHPGDLTFTVTLENLTADDAGKYRCGIATILQEDGLSGFLPDPFFQVQVLVSSASSTENSVKTP

SEQ ID NO: 2629 - protein, 74 aa, Homo sapiens
NDSLVPMSSWRSCARAPSSESAWRRSAATRRSRKCLRTKRKRWSSGKGTQMQSTLSETPRRAQMPCMWWYPFWG

SEQ ID NO: 2630 - protein, 114 aa, Homo sapiens
RATWHNAGKEREAVQLMAGAEKRVKASHSFLRGLFGGNTRIEEACEMYTRAANMFKMAKNWSAAGNAFCQAAKLHMQLQSKHDSATSFVDAGNAYKKADPQGKTARHVACYLCV

SEQ ID NO: 2631 - protein, 66 aa, Homo sapiens
VIYKLDSSLFSYFIYFFIFETESHFLPLMKWTGPIMAHCSLKILASRNSADSAFLSAGDTSLSHST

SEQ ID NO: 2632 - protein, 546 aa, Homo sapiens
SASIIIRGDKRASGEVGIAPSSRHILIGEPSAKYNGTAIISLVRGPGILGEVTVFWRIFPPSVGEFAETSGKLTMRDEQSAVIVVIQALNDDIPEEKSFYEFQLTAVSEGGVLSESSSTANITVVASDSPYGRFAFSHEQLRVSEAQRVNITIIRSSGDFGHVRLWYKTMSGTAEAGLDFVPAAGELLFEAGEMRKSLHVEILDDDYPEGPEEFSLTITKVELQGRGYDFTIQENGLQIDQPPEIGNISIVRIIIMKNDNAEGIIEFDPKYTAFEVEEDVGLIMIPVVRLHGTYGYVTADFISQSSSASPGGVDYILHGSTVTFQHGQNLSFINISIIDDNESEFEEPIEILLTGATGGAVLGRHLVSRIIIAKSDSPFGVIRFLNQSKISIANPNSTMILSLVLERTGGLLGEIQVNWETVGPNSQEALLPQNRDIADPVSGLFYFGEGEGGVRTIILTIYPHEEIEVEETFIIKLHLVKGEAKLDSRAKDVTLTIQEFGDPNGVVQFAPETLSKKTYSEPLALEGPLLITFFVRRVKGTFGEIM

SEQ ID NO: 2633 - protein, 67 aa, Homo sapiens
  misc_feature (1)...(67): Xaa = any amino acid or nothing
MGSKTLPAPVPIHPSLQLTNYSFLQAVNGLPTVPSDHLPNLYGFSALHAVHLHQWTLGYPAMHLXRS

SEQ ID NO: 2634 - protein, 189 aa, Homo sapiens
FVSPSRAMASALIYVSKFKSFVILVVTPLLLLPLVILMPAKFVRCAYVIILMAIYWCTEVIPLAVTSLMPVLLFPLFQILDSRQVCVQYMKDTNMLFLGGLIVAVAVERWNLHKRIALRTLLWVGAKPARLMLGFMGVTALLSMWISNTATTAMMVPIVEAILQQMEATSAATEAGLELVDKGKAKELP

SEQ ID NO: 2635 - protein, 146 aa, Homo sapiens
KQSTRPDVMTLYPLHWQEEMSGESVVSSAVPAAATRTTSFKGTSPSSKYVKLNVGGALYYTTMQTLTKQDTMLKAMFSGRMEVLTDSEGWILIDRCGKHFGTILNYLRDGAVPLPESRREIEELLAEAKYYLVQGLVEECQAALQV

SEQ ID NO: 2636 - protein, 191 aa, Homo sapiens
RPRGRGAWAGPGGDYSGVRRQQRRRTRISGSQRGSDAAGTMGCCTGRCSLICLCALQLVSALERQIFDFLGFQWAPILGNFLHIIVVILGLFGTIQYRPRYIMVYTVWTALWVTWNVFIICFYLEVGGLSKDTDLMTFNISVHRSWWREHGPGCVRRVLPPSAHGMMDDYTYVSVTGCIVDFQYLEVIHSA

SEQ ID NO: 2637 - protein, 41 aa, Homo sapiens
RSRMGDKPIWEQIGSSFIQHYYQLFDNDRTQLGAIYVSFQL

SEQ ID NO: 2638 - protein, 159 aa, Homo sapiens
MEEEDESRGKTEESGEDRGDGPPDRDPTLSPSAFILRAIQQAVGSSLQGDLPNDKDGSRCHGLRWRRCRSPRSEPRSQESGGTDTATVLDMATDSFLAGLVSVLDPPDTWVPSRLDLRPGESEDMLELVAEVRIGDRDPIPLPVPSLLPRLRAWRTGKT

SEQ ID NO: 2639 - protein, 67 aa, Homo sapiens
LLSRMPSTNRAGSLKDPEIAELFFKEDPEKLFTDLREIGHGSFGAAYFARDVRTNEVVAIKKMSYSG

SEQ ID NO: 2640 - protein, 163 aa, Homo sapiens
RGAKAKSAVLPPGPPCSSILILSPPAPLTPRSPGTEATRPTAMSKSLKKKSHWTSKVHESVIGRNPEGQLGFELKGGAENGQFPYLGEVKPGKVAYESGSKLVSEELLLEVNETPVAGLTIRDVLAVIKHCKDPLRLKCVKQGESSGLLSVLPGGGTARGAGQ

SEQ ID NO: 2641 - protein, 154 aa, Homo sapiens
RTIRETERRSALSCSVLKSEPLPGLQPQASQQRRRRLPGRRQVQVQEGGGSGLRAWVLAMASVLGSGRGSGGLSSQLKCKSKRRRRRRSKRKDKVSILSTFLAPFKHLSPGITNTEDDDTLSTSSAEVKENRNVGNLAARPPPSGDRARGGATR

SEQ ID NO: 2642 - protein, 249 aa, Homo sapiens
QRRRFRAGLWGGHGLTDGLRRNGGCGCSARVPRVGERLRGHRCPDPLCLLLDMLFLSFHAGSWESWCCCCLIPADRPWDRGQHWQLEMADTRSVHETRFEAAVKVIQSLPKNGSFQPTNEMMLKFYSFYKQATEGPCKLSRPGFWDPIGRYKWDAWSSLGDMTKEEAMIAYVEEMKKIIETMPMTEKVEELLRVIGPFYEIVEDKKSGRSSDITSDLGNVLTSTPNAKTVNGKAESSDSGAESEEEEAC

SEQ ID NO: 2643 - protein, 329 aa, Homo sapiens
PLMSLVRVVEFVAASSAQKTPSRLENYYMVCKADEKFNQLVHFLRNHKQEKHLVFFRYSSGLCGRGIRDSARMCSTCACVEYYGKALEVLVKGVKIMCIHGKMKYKRNKIFMEFRKLQSGILVCTDVMARGIDIPEVNWVLQYDPPSNASAFVHRCGRTARIGHGGSALVFLLPMEESYINFLAINQKCPLQEMKPQRNTADLLPKLKSMALADRAVFEKGMKAFVSYVQAYAKHECNLIFRLKDLDFASLARGFALLRMPKMPELRGKQFPDFVPVDVNTDTIPFKDKIREKQRQKLLEQQRREKTENEGRRKFIKNKAWSKQKAKKK

SEQ ID NO: 2644 - protein, 317 aa, Homo sapiens
VTMYKDCIESTGDYFLLCDAEGPWGIILESLAILGIVVTILLLLAFLFLMRKIQDCSQWNVLPTQLLFLLSVLGLFGLAFAFIIELNQQTAPVRYFLFGVLFALCFSCLLAHASNLVKLVRGCVSFSWTTILCIAIGCSLLQIIIATEYVTLIMTRGMMFVNMTPCQLNVDFVVLLVYVLFLMALTFFVSKATFCGPCENWKQHGRLIFITVLFSIIIWVVWISMLLRGNPQFQRQPQWDDPVVCIALVTNAWVFLLLYIVPELCILYRSCRQECPLQGNACPVTAYQHSFQVENQELSRDKWKVLLNSDFLSHSGA

SEQ ID NO: 2645 - protein, 47 aa, Homo sapiens
RPRVVTHNSQWCFLPQDHPGWLPGQSGAPGGRGAPRQEGPGSSWRQV

SEQ ID NO: 2646 - protein, 183 aa, Homo sapiens
EWSLDPFMGIMSGQVGDLSPSQEKSLAQFRENIQDVLSALPNPDDYFLLRWLQARSFDLQKSEDMLRKHMEFRKQQDLANILAWQPPEVVRLYNANGICGHDGEGSPVWYHIVGSQDPKGLLLSASKQELLRDSFRSCELLLRECELQSQKLGKRVEKIIAIFGLEGLGLRDLWKPGIELLQE

SEQ ID NO: 2647 - protein, 120 aa, Homo sapiens
  misc_feature (1)...(120): Xaa = any amino acid or nothing
MVSSCCGSVCSDQGCGQDLCQETCCRPSCCETTCCRTTCCRPSCCVSSCCRPQCCQSVCCQPTCSRPSCCQTTCCRTTCYRPSCCVSSCCRPQCCQPVCCQPTCCRPSCCETTCCHPXCC

SEQ ID NO: 2648 - protein, 120 aa, Homo sapiens
GGNRKSAEMFSQVPRTPASGCYYLNSMTPEGQEMYLRFDQTTRRSPYRMSRILARHQLVTKIQQEIEAKEACDWLRAAGFPQYAQLYEDSQFPINIVAVKNDHDFLEKDLGEPLCRRLNT

SEQ ID NO: 2649 - protein, 131 aa, Homo sapiens
PRFSELVDGRGRVSARFGGSPSKAATVRSQPTASAQLENMEEAPKRVSLALQLPEHGSKDIGNVPGNCSENPCQNGGTCVPGADAHSCDCGPGFKGRRCELACIKVSRPCTRLFSETKAFPVWEGGVCHHV

SEQ ID NO: 2650 - protein, 98 aa, Homo sapiens
AKIASLERIMPANYTCTRPDGDNTDFRYFIYAVTYTGILGPGLIGNILALWVFYGYMKETKRAVIFMINLAIADLLQVLSLPLRIFYYLKHDWPFVPV

SEQ ID NO: 2651 - protein, 2515 aa, Homo sapiens
PGIRVGITSQTGLSSNLQENCSKLAFISSHGTEKQLQCMPMEGRGRASSSISDLQGKGFEKGTGEKHVPGVGSARHSPQASAGGSPWQRGKAQTRWLGKPDPGRKRRRGSPQEEGGLRVSAAARLLCSGANRCKVLVRQNSTPNTQQPAVHPSTPPSRPLPQAGRCLVAPLRPHPDWVAAKTLAKALRAPGKPWRLAAPSPLGDLGAPGLPGPSTAPRTLSVEEPGVECNQLCLYADVTDPVLCLGQKDPGVEGKHCEKEKISSSKELKHVHAKSEPSKPARRLSESLHVVDENKNESKIEREHKRRTSTPVIMEGVQEETDTRDVKRQVERSEICTEEPQKQKSTLKNEKHLKKDDSETPHLKSLLKKEVKSSKEKPEREKTPSEDKLSVKHKYKGDCMHKTGDETELHSSEKGLKVEENIQKQSQQTKLSSDDKTERKSKHRNERKLSVLGKDGKPVSEYIIKTDENVRKENNKKERRLSAEKTKAEHKSRRSSDSKIQKDSLGSKQHGITLQRRSESYSEDKCDMDSTNMDSNLKPEEVVHKEKRRTKSLLEEKLVLKSKSKTQGKQVKVVETELQEGATKQATTPKPDKEKNTEENDSEKQRKSKVEDKPFEETGVEPVLETASSSAHSTQKDSSHRAKLPLAKEKYKSDKDSTSTRLERKLSDGHKSRSLKHSSKDIKKKDENKSDDKDGKEVDSSHEKARGNSSLMEKKLSRRLCENRRGSLSQEMAKGEEKLAANTLSTPSGSSLQRPKKSGDMTLIPEQEPMEIDSEPGVENVFEVSKTQDNRNNNSHQDIDSENMKQKTSATVQKDELRTCTADSKATAPAYKPGRGTGVNSNSEKHADHRSTLTKKMHIQSAVSKMNPGEKEPIHRGTTEVNIDSETVHRMLLSAPSENDRVQKNLKNTAAEEHVAQGDATLEHSTNLDSSPSLSSVTVVPLRESYDPDVIPLFDKRTVLEGSTASTSPADHSALPNQSLTVRESEVLKTSDSKEGGEGFTVDTPAKASITSKRHIPEAHQATLLDGKQGKVIMPLGSKLTGVIVENENITKEGGLVDMAKKENDLNAEPNLKQTIKATVENGKKDGIAVDHVVGLNTEKYAETVKLKHKRSPGKVKDISIDVERRNENSEVDTSAGSGSAPSVLHQRNGQTEDVATGPRRAEKTSVATSTEGKDKDVTLSPVKAGPATTTSSETRQSEVALPCTSIEADEGLIIGTHSRNNPLHVGAEASECTVFAAAEEGGAVVTEGFAESETFLTSTKEGESGECAVAESEDRAADLLAVHAVKIEANVNSVVTEEKDDAVTSAGSEEKCDGSLSRDSEIVEGTITFISEVESDGAVTSAGTEIRAGSISSEEVDGSQGNMMRMGPKKETEGTVTCTGAEGRSDNFVICSVTGAGPREERMVTGAGVVLGDNDAPPGTSASQEGDGSVNDGTEGESAVTSTGITEDGEGPASCTGSEDSSEGFAISSESEENGESAMDSTVAKEGTNVPLVAAGPCDDEGIVTSTGAKEEDEEGEDVVTSTGRGNEIGHASTCTGLGEESEGVLICESAEGDSQIGTVVEHVEAEAGAAIMNANENNVDSMSGTEKGSKDTDICSSAKGIVESSVTSAVSGKDEVTPVPGGCEGPMTSAASDQSDSQLEKVEDTTISTGLVGGSYDVLVSGEVPECEVAHTSPSEKEDEDIITSVENEECDGLMATTASGDITNQNSLAGGKNQGKVLIISTSTTNDYTPQVSAITDVEGGLSDALRTEENMEGTRVTTEEFEAPMPSAVSGDDSQLTASRSEEKDECAMISTSIGEEFELPISSATTIKCAESLQPVAAAVEERATGPVLISTADFEGPMPSAPPEAESPLASTSKEEKDECALISTSIAEECEASVSGVVVESENERAGTVMEEKDGSGIISTSSVEDCEGPVSSAVPQEEGDPSVTPAEEMGDTAMISTSTSEGCEAVMIGAVLQDEDRLTITRVEDLSDAAIISTSTAECMPISASIDRHEENQLTADNPEGNGDLSATEVSKHKVPMPSLIAENNCRCPGPVRGGKEPGPVLAVSTEEGHNGPSVHKPSAGQGHPSAVCAEKEEKHGKECPEIGPFAGRGQKESTLHLINAEEKNVLLNSLQKEDKSPETGTAGGSSTASYSAGRGLEGNANSPAHLRGPEQTSGQTAKDSSVSSIRYLAAVNTGAIKADDMPPVQGTVAEHSFLPAEQQGSEDNLKTSTTKCITGQESKIAPSHTMIPPATYSVALLAPKCEQDLTIKNDYSGKWTDQASAEKTGDDNSTRKSFPEEGDIMVTVSSEENVCDIGNEESPLNVLGGLKLKANLKMEAYVPSEEEKNGEILAPPESLCGGKPSGIAELQREPLLVNESLNVENSGFRTNEEIHSESYNKGEISSGRKDNAEAISGHSVEADPKEVEEEERHMPKRKRKQHYLSSEDEPDDNPDVLDSRIETAQRQCPETEPHATKEENSRDLEELPKTSSETNSTTSRVMEEKDEYSSSETTGEKPEQNDDDTIKSQE

SEQ ID NO: 2652 - protein, 174 aa, Homo sapiens
EPSLFPFLRPSPARPPPRPPAPFPSPELAGPEPHFVFYFFLSYVHPPKELAKYEYMEEQVILTEKGNSTVAGRGTSVRCLSPSPRPLPPLLPLLADLLEDGFGEHPFYHCLVAEVPKEHWTPEGNPSPFPEARETKCYVRSSVGCVEPLTTQAEVTENLDRKNSQQVFKLLKKK

SEQ ID NO: 2653 - protein, 74 aa, Homo sapiens
NMILLKKRRLLINSLGEGTINGLLDELLETNVLSQEDTEIVKCENVTVIDKARDLLDSVIRKGARACEICITYI

SEQ ID NO: 2654 - protein, 185 aa, Homo sapiens
LCTLSPGISGTAGSCLTTEPGTELGTSFAQNGFYHEAVVLFTQALKLNPQDHRLFGNRSFCHERLGQPAWALADAQVALTLRPGWPRGLFRLGKALMGLQRFREAAAVFQETLRGGSQPDAARELRSCLLHLTLQGQRGGICAPPLSPGALQPLPHAELAPSGLPSLRCPRSTALRSPGLSPLLH

SEQ ID NO: 2655 - protein, 130 aa, Homo sapiens
TDLLGRRFRVDGAAMAACEGRRSGALGSSQSDFLTPPVGGAPWAVATTVVMYPPPPPPPHRDFISVTLSFGESYDNSKSWRRRSCWRKWKQLSRLQRNMILFLLAFLLFCGLLFYINLADHWKGIRNTCT

SEQ ID NO: 2656 - protein, 136 aa, Homo sapiens
IPGSTISLEGPLSKWTNVMKGWQYRWFVLDYNAGLLSYYTSKDKMMRGSRRGCVRLRGAVIGIDDEDDSTFTITVDQKTFHFQARDADEREKWIHALEETILRHTLQLQVRVFTWFPDSSLVGAFFFWLVSGFFFK

SEQ ID NO: 2657 - protein, 74 aa, Homo sapiens
QGLPSTMVKLGCSFSGKPGKDPGDQDGAAMDSVPLISPLDISQLQPPLPDQVVIKTQTEYQLSSPDQQNYTKSR

SEQ ID NO: 2658 - protein, 150 aa, Homo sapiens
ECGGIRQPGPGPPPALASAPAATMNRVGGSPSAAANYLLCTNCRKVLRKDKRIRVSQPLTRGPSAFIPEKEVVQANTVDERTNFLVEEYSTSGRLDNITQVMSLHTQYLESFLRSQFYMLRMDGPLPLPYRHYIAIMAAARHQCSYLINM

SEQ ID NO: 2659 - protein, 125 aa, Homo sapiens
RGWPEQQSTGRPRDVARQPRCQKEEGRRLRPRALESRTFQGSERSRWGPPLESTKENVQCGHRPAFPNSSWLPFHERLQVQNGECPWQVSIQMSRKHLCGGSILHWWWVLTAAHCFRRTLLDMAV

SEQ ID NO: 2660 - protein, 66 aa, Homo sapiens
AFQLFNAKCESAFLSKRNPLQRNWTVLYRRKHKKGQSAEIQKKRTRRAFKFQRAITGASLADIMAK

SEQ ID NO: 2661 - protein, 191 aa, Homo sapiens
LPGADYGGGHLSLRLFHLLLTSAAWVPDESQVTLNSAICVLSTVLIMEFPDLGKHCSEKTCKQLDFLPVKCDACKQDFCKDHFPYAAHKCPFAFQKDVHVPVCPLCNTPIPVKKGQIPDVVVGDHIDRDCDSHPGKKKEKIFTYRCSKEGCKKKEMLQMVCAQCHGNFCIQHRHPLDHSCRHGSRPTIKAG

SEQ ID NO: 2662 - protein, 222 aa, Homo sapiens
STSSDEGSPSASTPMINKTGFKFSAEKPVIEVPSMTILDKKDGEQAKALFEKVRKFRAHVEDSDLIYKLYVVQTVIKTAKFIFILCYTANFVNAISFEHVCKPKVEHLIGYEVFECTHNMAYMLKKLLISYISIICVYGFICLYTLFWLFRIPLKEYSFEKVREESSFSDIPDVKNDFAFLLHMVDQYDQLYSKRFGVFLSEVSENKLREISLNHEWTFEKL

SEQ ID NO: 2663 - protein, 318 aa, Homo sapiens
GAHRVLSPAQGAQPRLRSAASVEVSMVGQRVLLLVAFLLSGVLLSEAAKILTISTLGGSHYLLLDRVSQILQEHGHNVTMLHQSGKFLIPDIKEEEKSYQVIRWFSPEDHQKRIKKHFDSYIETALDGRKESEALVKLMEIFGTQCSYLLSRKDIMDSLKNENYDLVFVEAFDFCSFLIAEKLVKPFVAILPTTFGSLDFGLPSPLSYVPVFPSLLTDHMDFWGRVKNFLMFFSFSRSQWDMQSTFDNTIKEHFPEGSRPVLSHLLLKAELWFVNSDCAFDFARPLLPNTVYIGGLMEKPIKPVPQVSEPSAFSLGFT

SEQ ID NO: 2664 - protein, 451 aa, Homo sapiens
NVQLAKFSSTLVFFFSCDADPSALAKYVLALVKKDKSEKELKALCIDQLDVFLQKETQIFVEKLFDAVNTKSYLPPPEQPSSGSLKVEFFPPQEKDIKKEEITKEEEREKKFSRRLNHSPPQSSSRYRENRSRDERKKDDRSRKRDYDRNPPRRDSYRDRYNRRRGRSRSYSRSRSRSWSKERLRERDRDRSRTRSRSRTRSRERDLVKPKYDLDRTDPLENNYTPVSSVPSISSGHYPVPTLSSTITVIAPTHHGNNTTESWSEFHEDQVDHNSYVRPPMPKKRCRDYDEKGFCMRGDMCPFDHGSDPVVVEDVNLPGMQPFPAQPPVVEGPPPPGLPPPPPILTPPPVNLRPPVPPPGPLPPSLPPVTGPPPPLPPLQPSGMDAPPNSATSSVPTVVTTGIHHQPPPAPPSLFTADTYDTDGYNPEAPSITNTSRPMYRHRVHPRAKLG

SEQ ID NO: 2665 - protein, 294 aa, Homo sapiens
SHPLLSCPEKVSAKLRAAAEAAAEERRTRGAGSRGICAGLRSVAPGPEPLKQEEGRREWGSSIGTPSPCGSAQAAAAAAAEEATEKIPALRPALLWALLALWLCCATPAHALQCRDGYEPCVNEGMCVTYHNGTGYCKCPEGFLGEYCQHRDPCEKNRCQNGGTCVAQAMLGKATCRCASGFTGEDCQYSTSHPCFVSRPCLNGGTCHMLSRDTYECTCQVGFTGRNPKCPGGNLNYQFNGIIVVYSGGSVPPSGTKTSKPAEHNAMGTGSKNFASGTLWVMVSGATSTSTSTL

SEQ ID NO: 2666 - protein, 151 aa, Homo sapiens
SLSMESNHKSGDGLSGTQKEAALRALVQRTGYSLVQENGQRKYGGPPPGWDAAPPERGCEIFIGKLPRDLFEDELIPLCEKIGKIYEMRMMMDFNGNNRGYAFVTFSNKVEAKNAIKQLNNYEIRNGRLLGVCASVDNCRLFVGGIPKTKK

SEQ ID NO: 2667 - protein, 599 aa, Homo sapiens
LLKSCGVLLSGVCIPCEGKGPTVLVIQTAVPQDRPTKSSMRSAAKPWNPAIRAGGHGPDRVRPLPAASSGMKSSKSSTSLAFESRLSRLKRASSEDTLNKPGSTAASGVVRLKKTATAGAISELTESRLRSGTGAFTTTKRTGIPAPREFSVTVSRERSVPRGPSNPRKSVSSPTSSNTPTPTKHLRTPSTKPKQENEGGEKAALESQVRELLAEAKAKDSEINRLRSELKKYKEKRTLNAEGTDALGPNVDGTSVSPGDTEPMIRALEEKNKNFQKELSDLEEENRVLKEKLIYLEHSPNSEGAASHTGDSSCPTSITQESSFGSPTGNQLSSDIDEYKKNIHGNALRTSGSSSSDVTKASLSPDASDFEHITAETPSRPLSSTSNPFKSSKCSTAGSSPNSVSELSLASLTEKIQKMEENHHSTAEELQATLQELSDQQQMVQELTAENEKLVDEKTILETSFHQHRERAEQLSQENEKLMNLLQERVKNEEPTTQEGKIIELEQKCTGILEQGRFEREKLLNIQQQLTCSLRKVEEENQGALEMIKRLKEENEKLNEFLELERHNNNMMAKTLEECRVTLEGLKMENGSLKSHLQG

SEQ ID NO: 2668 - protein, 182 aa, Homo sapiens
GECFIMAAVVQQNDLVFEFASNVMEDERQLGDPAIFPAVIVEHVPGADILNSYAGLACVEEPNDMITESSLDVAEEEIIDDDDDDITLTVEASCHDGDETIETIEAAEALLNMDSPGPMLDEKRINNNIFSSPEDDMVVAPVTHVSVTLDGIPEVMETQQVQEKYADSPGASSPEQPKRKKK

SEQ ID NO: 2669 - protein, 162 aa, Homo sapiens
  misc_feature (1)...(162): Xaa = any amino acid or nothing
MEVRMSGSVAVTRAIAVPGLLLLLIIATALSLLIGAKSLPASVVLEAFSGTCQSADCTIVLDARLPRTLAGLLAGGALGLAGALMQTLTRNPLADPGLLGVNAGASFAIVLGAALFGYSSAQEQLAMAFAGALVASLIVAFTGSQGGGQLSPVRLTLAGVXL

SEQ ID NO: 2670 - protein, 146 aa, Homo sapiens
KMNQVAVVIGGGQTLGAFLCHGLAAEGYRVAVVDIQSDKAANVAQEINAEYGESMAYGFGADATSEQSVLALSRGVDEIFGRVDLLVYSAGIAKAAFISDFQLGDFDRSLQVNLVGYFLCAREFSRLMIRDGIQGRIIQINSKSDE

SEQ ID NO: 2671 - protein, 151 aa, Homo sapiens
RHRTAGPGSTISSRTDSASAPAARAMPCEYTYAKLTSDCSRPSLQWYTRAQSKMRRPRLLLKDILKCTLLVFGVRILYILKLNYTTEECDMKNMHYVDPDHVKRAQKYAQQVLQKESPPKFAKTSMALLFEHRYSVDLLPFVQKAPTDSEA

SEQ ID NO: 2672 - protein, 133 aa, Homo sapiens
EPSNGPVVYSALGNEDDEILLLGKDIIGTFAASERKMRAHQVLTFLLLFVITSGASENASTSRGCGLDLLPQNVYLCDLDAIWGIVVEAVAGAGALITLLLMLILLGRLPFIKEKEKKSPAVLHFLFLLGTLG

SEQ ID NO: 2673 - protein, 125 aa, Homo sapiens
SSLGNEDDEILSLAKDITGMFVASHRKMRAHQVLTFLLLFVITSVASENASTSRGCGLDLLPQYVSLCDLDAIWGIVVEAAAGAGALITLLLMLILLVRLPFFKEKEKKSPVGLHFLFLLGTLGP

SEQ ID NO: 2674 - protein, 310 aa, Homo sapiens
ERLCFPCMQSKIYSYMSPNKCSGMRFPLQEENSVTHHEVKCQGKPLAGIYRKREEKRNAGNAVRSAMKSEEQKIKDARKGPLVPFPNQKSEAAEPPKTPPSSCDSTNAAIAKQALKKPIKGKQAPRKKAQGKTQQNRKLTDFYPVRRSSRKSKAELQSEERKRIDELIESGKEEGMKIDLIDGKGRGVIATKQFSRGDFVVEYHGDLIEITDAKKREALYAQDPSTGCYMYYFQYLSKTYCVDATRETNRLGRLINHSKCGNCQTKLHDIDGVPHLILIASRDIAAGEELLYDYGDRSKASIEAHPWLKH

SEQ ID NO: 2675 - protein, 288 aa, Homo sapiens
PGSTISCSELKGTQCRATAGSRGRRPPMTCWLRGVTATFGRPAEWPGYLSHLCGRSAAMDLGPMRKSYRGDREAFEETHLTSLDPVKQFAAWFEEAVQCPDIGEANAMCLATCTRDGKPSARMLLLKGFGKDGFRFFTNFESRKGKELDSNPFASLVFYWEPLNRQVRVEGPVKKLPEEEAECYFHSRPKSSQIGAVVSHQSSVIPDREYLRKKNEELEQLYQDQEVPKPKSWGGYVLYPQVMEFWQGQTNRLHDRIVFRRGLPTGDSPLGPMTHRGEEDWLYERLAP

SEQ ID NO: 2676 - protein, 327 aa, Homo sapiens
ARAAAHCGICRLVRWWRKRRSVMGIQTSPVLLASLGVGLVTLLGLAVGSYLVRRSRRPQVTLLDPNEKYLLRLLDKTTVSHNTKRFRFALPTAHHTLGLPVGKHIYLSTRIDGSLVIRPYTPVTSDEDQGYVDLVIKVYLKGVHPKFPEGGKMSQYLDSLKVGDVVEFRGPSGLLTYTGKGHFNIQPNKKSPPEPRVAKKLGMIAGGTGITPMLQLIRAILKVPEDPTQCFLLFANQTEKDIILREDLEELQARYPNRFKLWFTLDHPPKDWAYSKGFVTADMIREHLPAPGDDVLVLLCGPPPMVQLACHPNLDKLGYSQKMRFTY

SEQ ID NO: 2677 - protein, 322 aa, Homo sapiens
LQSAGEGVTHVLILLESPARPVAAVTQVQRRRYHRLSDMSMLAERRRKQKWAVDPQNTAWSNDDSKFGQRMLEKMGWSKGKGLGAQEQGATDHIKVQVKNNHLGLGATINNEDNWIAHQDDFNQLLAELNTCHGQETTDSSDKKEKKSFSLEEKSKISKNRVHYMKFTKGKDLSSRSKTDLDCIFGKRQSKKTPEGDASPSTPEENETTTTSAFTIQEYFAKRMAALKNKPQVPVPGSDISETQVERKRGKKRNKEATGKDVESYLQPKAKRHTEGKPERAEAQERVAKKKSAPAEEQLRGPCWDQSSKASAQDAGDHVQPA

SEQ ID NO: 2678 - protein, 88 aa, Homo sapiens
GSAAMKVKIKCWNGVATWLWVANDENCGICRMAFNGCCPDCKVPGDDCPLVWGQCSHCFHMHCILKWLHAQQVQQHCPMCRQEWKFKE

SEQ ID NO: 2679 - protein, 320 aa, Homo sapiens
QMEPGNDTQISEFLLLGFSQEPGLQPFLFGLFLSMYLVTVLGNLLIILATISDSHLHTPMYFFLSNLSFADICVTSTTIPKMLMNIQTQNKVITYIACLMQMYFFILFAGFENFLLSVMAYDRFVAICHPLHYMVIMNPHLCGLLVLASWTMSALYSLLQILMVVRLSFCTALEIPHFFCELNQVIQLACSDSFLNHMVIYFTVALLGGGPLTGILYSYSKIISSIHAISSAQGKYKAFSTCASHLSVVSLFYGAILGVYLSSAATRNSHSSATASVMYTVVTPMLNPFIYSLRNKDIKRALGIHLLWGTMKGQFFKKCP

SEQ ID NO: 2680 - protein, 846 aa, Homo sapiens
IPFLKSCCCCCLFDFPPPPLDQVQEEECEVERVTEHGTPKPFRKFDSVAFGESQSEDEQFENDLETDPPNWQQLVSREVLLGLKPCEIKRQEVINELFYTERAHVRTLKVLDQVFYQRVSREGILSPSELRKIFSNLEDILQLHIGLNEQMKAVRKRNETSVIDQIGEDLLTWFSGPGEEKLKHAAATFCSNQPFALEMIKSRQKKDSRFQTFVQDAESNPLCRRLQLKDIIPTQMQRLTKYPLLLDNIATYTEWPTEREKVKKAADHCRQILNYVNQAVKEAENKQRLEDYQRRLDTSSLKLSEYPNVEELRNLDLTKRKMIHEGPLVWKVNRDKTIDLYTLLLEDILVLLQKQDDRLVLRCHSKILASTADSKHTFSPVIKLSTVLVRQVATDNKALFVISMSDNGAQIYELVAQTVSEKTVWQDLICRMAASVKEQSTKPIPLPQSTPGEGDNDEEDPSKLKEEQHGISVTGLQSPDRDLGLESTLISSKPQSHSLSTSGKSEVRDLFVAERQFAKEQHTDGTLKEVGEDYQIAIPDSHLPVSEERWALDALRNLGLLKQLLVQQLGLTEKSVQEDWQHFPRYRTASQGPQTDSVIQNSENIKAYHSGEGHMPFRTGTGDIATCYSPRTSTESFAPRDSVGLAPQDSQASNILVMDHMIMTPEMPTMEPEGGLDDSGEHFFDAREAHSDENPSEGDGAVNKEEKDVNLRISGNYLILDGYDPVQESSTDEEVASSLTLQPMTGIPAVESTHQQQHSPQNTHSDGAISPFTPEFLVQQRWGAMEYSCFEIQSPSSCADSQSQIMEYIHKIEADLEHLKKVEESYTILCQRLAGSALTDKHSDKS

SEQ ID NO: 2681 - protein, 700 aa, Homo sapiens
AVEFAEGALTMAPWPELGDAQPNPDKYLEGAAGQQPTAPDKSKETNKTDNTEAPVTKIELLPSYSTATLIDEPTEVDDPWNLPTLQDSGIKWSERDTKGKILCFFQGIGRLILLLGFLYFFVCSLDILSSAFQLVGGKMAGQFFSNSSIMSNPLLGLVIGVLVTVLVQSSSTSTSIVVSMVSSSLLTVRAAIPIIMGANIGTSITNTIVALMQVGDRSEFRRAFAGATVHDFFNWLSVLVLLPVEVATHYLEIITQLIVESFHFKNGEDAPDLLKVITKPFTKLIVQLDKKVISQIAMNDEKAKNKSLVKIWCKTFTNKTQINVTVPSTANCTSPSLCWTDGIQNWTMKNVTYKENIAKCQHIFVNFHLPDLAVGTILLILSLLVLCGCLIMIVKILGSVLKGQVATVIKKTINTDFPFPFAWLTGYLAILVGAGMTFIVQSSSVFTSALTPLIGIGVITIERAYPLTLGSNIGTTTTAILAALASPGNALRSSLQIALCHFFFNISGILLWYPIPFTRLPIRMAKGLGNISAKYRWFAVFYLIIFFFLIPLTVFGLSLAGWRVLVGVGVPVVFIIILVLCLRLLQSRCPRVLPKKLQNWNFLPLWMRSLKPWDAVVSKFTGCFQMRCCCCCRVCCRACCLLCGCPKCCRCSKCCEDLEEAQEGQDVPVKAPETFDNITISREAQGEVPASDSKTECTAL

SEQ ID NO: 2682 - protein, 448 aa, Homo sapiens
SQQGSQPHRQGPPSLLTAPHSLDLPALPPGPRGSQGKLRRVLVPMSVKPSWGPGPSEGVTAVPTSDLGEIHNWTELLDLFNHTLSECHVELSQSTKRVVLFALYLAMFVVGLVENLLVICVNWRGSGRAGLMNLYILNMAIADLGIVLSLPVWMLEVTLDYTWLWGSFSCRFTHYFYFVNMYSSIFFLVCLSVDRYVTLTSASPSWQRYQHRVRRAMCAGIWVLSAIIPLPEVVHIQLVEGPEPMCLFMAPFETYSTWALAVALSTTILGFLLPFPLITVFNVLTACRLRQPGQPKSRRHCLLLCAYVAVFVMCWLPYHVTLLLLTLHGTHISLHCHLVHLLYFFYDVIDCFSMLHCVINPILYNFLSPHFRGRLLNAVVHYLPKDQTKAGTCASSSSCSTQHSIIITKGDSQPAAAAPHPEPSLSFQAHHLLPNTSPISPTQPLTPS

SEQ ID NO: 2683 - protein, 294 aa, Homo sapiens
AAGAGADGREPASERASRAEPPAVAMGQNDLMGTAEDFADQFLRVTKQYLPHVARLCLISTFLEDGIRMWFQWSEQRDYIDTTWNCGYLLASSFVFLNLLGQLTGCVLVLSRNFVQYACFGLFGIIALQTIAYSILWDLKFLMRNLALGGGLLLLLAESRSEGKSMFAGVPTMRESSPKQYMQLGGRVLLVLMFMTLLHFDASFFSIVQNIVGTALMILVAIGFKTKLAALTLVVWLFAINVYFNAFWTIPVYKPMHDFLKYDFFQTMSVIGGLLLVVALGPGGVSMDEKKKEW

SEQ ID NO: 2684 - protein, 501 aa, Homo sapiens
QAWSLQVALSPFFFPASPSNSFAAAVPQLLFPELPLPHVPGQESAKRRSARRFLIMSELTKELMELVWGTKSSPGLSDTIFCRWTQGFVFSESEGSALEQFEGGPCAVIAPVQAFLLKKLLFSSEKSSWRDCSQEEQKELLCHTLCDILESACCDHSGSYCLVSWLRGKTTEETASISGSPAESSCQVEHSSALAVEELGFERFHALIQKRSFRSLPELKDAVLDQYSMWGNKFGVLLFLYSVLLTKGIENIKNEIEDASEPLIDPVYGHGSQSLINLLLTGHAVSNVWDGDRECSGMKLLGIHEQAAVGFLTLMEALRYCKVGSYLKISKIPYLDCLASETHLTVFFAKDMALVAPEAPSEQARRVFQTYDPEDNGFIPDSLLEDVMKALDLVSDPEYINLMKNKLDPEGLGIILLGPFLQEFFPDQGSSGPESFTVYHYNGLKQSNYNEKVMYVEGTAVVMGFEDPMLQTDDTPIKRCLQTKWPYIELLWTTDRSPSLN

SEQ ID NO: 2685 - protein, 949 aa, Homo sapiens
TRTKRRLGREKAMASPPRGWGCGELLLPFMLLGTLCEPGSGQIRYSMPEELDKGSFVGNIAKDLGLEPQELAERGVRIVSRGRTQLFALNPRSGSLVTAGRIDREELCAQSPLCVVNFNILVENKMKIYGVEVEIIDINDNFPRFRDEELKVKVNENAAAGTRLVLPFARDADVGVNSLRSYQLSSNLHFSLDVVSGTDGQKYPELVLEQPLDREKETVHDLLLTALDGGDPVLSGTTHIRVTVLDANDNAPLFTPSEYSVSVPENIPVGTRLLMLTATDPDEGINGKLTYSFRNEEEKISETFQLDSNLGEISTLQSLDYEESRFYLMEVVAQDGGALVASAKVVVTVQDVNDNAPEVILTSLTSSISEDCLPGTVIALFSVHDGDSGENGEIACSIPRNLPFKLEKSVDNYYHLLTTRDLDREETSDYNITLTVMDHGTPPLSTESHIPLKVADVNDNPPNFPQASYSTSVTENNPRGVSIFSVTAHDPDSGDNARVTYSLAEDTFQGAPLSSYVSINSDTGVLYALRSFDYEQLRDLQLWVTASDSGNPPLSSNVSLSLFVLDQNDNTPEILYPALPTDGSTGVELAPRSAEPGYLVTKVVAVDKDSGQNAWLSYRLLKASEPGLFAVGLHTGEVRTARALLDRDALKQSLVVAVEDHGQPPLSATFTVTVAVADRIPDILADLGSIKTPIDPEDLDLTLYLVVAVAAVSCVFLAFVIVLLVLRLRRWHKSRLLQAEGSRLAGVPASHFVGVDGVRAFLQTYSHEVSLTADSRKSHLIFPQPNYADTLLSEESCEKSEPLLMSDKVDANKEERRVQQAPPNTDWRFSQAQRPGTSGSQNGDDTGTWPNNQFDTEMLQAMILASASEAADGSSTLGGGAGTMGLSARYGPQFTLQHVLQGELGSDYRQNVYIPGSNATLTNAAGKRDGKAPAGGNGNKKKSGKKEKK

SEQ ID NO: 2686 - protein, 185 aa, Homo sapiens
RPRRRQPSFSCRVLVLEDPPCFRFTNSMNQEKLAKLQAQVRIGGKGTARRKKKVVHRTATADDKKLQSSLKKLAVNNIAGIEEVNMIKDDGTVIHFNNPKVQASLSANTFAITGHAEAKPITEMLPGILSQLGADSLTSLRKLAEQFPRQVLDSKAPKPEDIDEEDDDVPDLVENFDEASKNEAN

SEQ ID NO: 2687 - protein, 421 aa, Homo sapiens
IPGSTISWSPAAARGLSVCRCCRLHPASAMDLFGDLPEPERSPRPAAGKEAQKGPLLFDDLPPASSTDSGSGGPLLFDDLPPASSGDSGSLATSISQMVKTEGKGAKRKTSEEEKNGSEELVEKKVCKASSVIFGLKGYVAERKGEREEMQDAHVILNDITEECRPPSSLITRVSYFAVFDGHGGIRASKFAAQNLHQNLIRKFPKGDVISVEKTVKRCLLDTFKHTDEEFLKQASSQKPAWKDGSTATCVLAVDNILYIANLGDSRAILCRYNEESQKHAALSLSKEHNPTQYEERMRIQKAGGNVRDGRVLGVLEVSRSIGDGQYKRCGVTSVPDIRRCQLTPNDRFILLACDGLFKVFTPEEAVNFILSCLEDEKIQTREGKSAADARYEAACNRLANKAVQRGSADNVTVMVVRIGH

SEQ ID NO: 2688 - protein, 195 aa, Homo sapiens
GPSQSMAAGELEGGKPLSGLLNALAQDTFHGYPGITEELLRSQLYPEVPPEEFRPFLAKMRGILKSIASADMDFNQLEAFLTAQTKKQGGITSDQAAVISKFWKSHKTKIRESLMNQSRWNSGLRGLSWRVDGKSQSRHSAQIHTPVAIIELELGKYGQESEFLCLEFDEVKVNQILKTLSEVEESISTLISQPN

SEQ ID NO: 2689 - protein, 113 aa, Homo sapiens
LGAMAKHHPDLIFCRKQAGVAIGRLCEKCDGKCVICDSYVRPCTLVRICDECNYGSYQGRCVICGGPGVSDAYYCKECTIQEKDRDGCPKIVNLGSSKTDLFYERKKYGFKKR

SEQ ID NO: 2690 - protein, 1119 aa, Homo sapiens
SQLRKGASATHSSPSRTDCIAQMMDIYVCLKRPSWMVDNKRMRTASNFQWLLSTFILLYLMNQVNSQKKGAPHDLKCVTNNLQVWNCSWKAPSGTGRGTDYEVCIENRSRSCYQLEKTSIKIPALSHGDYEITINSLHDFGSSTSKFTLNEQNVSLIPDTPEILNLSADFSTSTLYLKWNDRGSVFPHRSNVIWEIKVLRKESMELVKLVTHNTTLNGKDTLHHWSWASDMPLECAIHFVEIRCYIDNLHFSGLEEWSDWSPVKNISWIPDSQTKVFPQDKVILVGSDITFCCVSQEKVLSALIGHTNCPLIHLDGENVAIKIRNISVSASSGTNVVFTTEDNIFGTVIFAGYPPDTPQQLNCETHDLKEIICSWNPGRVTALVGPRATSYTLVESFSGKYVRLKRAEAPTNESYQLLFQMLPNQEIYNFTLNAHNPLGRSQSTILVNITEKVYPHTPTSFKVKDINSTAVKLSWHLPGNFAKINFLCEIEIKKSNSVQEQRNVTIKGVENSSYLVALDKLNPYTLYTFRIRCSTETFWKWSKWSNKKQHLTTEASPSKGPDTWREWSSDGKNLIIYWKPLPINEANGKILSYNVSCSSDEETQSLSEIPDPQHKAEIRLDKNDYIISVVAKNSVGSSPPSKIASMEIPNDDLKIEQVVGMGKGILLTWHYDPNMTCDYVIKWCNSSRSEPCLMDWRKVPSNSTETVIESDEFRPGIRYNFFLYGCRNQGYQLLRSMIGYIEELAPIVAPNFTVEDTSADSILVKWEDIPVEELRGFLRGYLFYFGKGERDTSKMRVLESGRSDIKVKNITDISQKTLRIADLQGKTSYHLVLRAYTDGGVGPEKSMYVVTKENSVGLIIAILIPVAVAVIVGVVTSILCYRKREWIKETFYPDIPNPENCKALQFQKSVCEGSSALKTLEMNPCTPNNVEVLETRSAFPKIEDTEIVSPVAERPENRSDAKPENHVVESYCPPIIEEEIPNPAADETGGTAQVIYIDVQSMYQPQAKPEEEQENDPVGGAGYKPQMHLPINSTVEDIAAEEDLDKTAGYRPQANVNTWNLVSPDSPRSIDSNSEIVSFGSPCSINSRQFLIPPKDEDSPKSNGGGWSFTNFFQNKPND

SEQ ID NO: 2691 - protein, 1685 aa, Homo sapiens
MLPPKHLSATKPKKSWAPNLYELDSDLTKEPDVIIGEGPTDSEFFHQRFRNLIYVEFVGPRKTLIKLRNLCLDWLQPETRTKEEIIELLVLEQYLTIIPEKLKPWVRAKKPENCEKLVTLLENYKEMYQPEGESLHGVLVVSAGLRCPLGLSASTLLTWSGLDNSLSWAAVGMSCVLWDIELHHDFLGVATKSVSTHAQGDAAQGLGGTIVRMWARDSNLATGVLLDDNNSDVTSDDDMTRNRRESSPPHSVHSFSGDRDWDRRGRSRDTEPRDRWSHTRNPRSRMPPRDLSLPVVAKTSFEMDREDDRDSRAYESRSQDAESYQNVVDLAEDRKPHNTIQDNMENYRKLLSLGVQLAEDDGHSHMTQGHSSRSKRSAYPSTSRGLKTMPEAKKSTHRRGICEDESSHGVIMEKFIKDVSRSSKSGRARESSDRSQRFPRMSDDNWKDISLNKRESVIQQRVYEGNAFRGGFRFNSTLVSRKRVLERKRRYHFDTDGKGSIHDQKGCPRKKPFECGSEMRKAMSVSSLSSLSSPSFTESQPIDFGAMPYVCDECGRSFSVISEFVEHQIMHTRENLYEYGESFIHSVAVSEVQKSQVGGKRFECKDCGETFNKSAALAEHRKIHARGYLVECKNQECEEAFMPSPTFSELQKIYGKDKFYECRVCKETFLHSSALIEHQKIHFGDDKDNEREHERERERERGETFRPSPALNEFQKMYGKEKMYECKVCGETFLHSSSLKEHQKIHTRGNPFENKGKVCEETFIPGQSLKRRQKTYNKEKLCDFTDGRDAFMQSSELSEHQKIHSRKNLFEGRGYEKSVIHSGPFTESQKSHTITRPLESDEDEKAFTISSNPYENQKIPTKENVYEAKSYERSVIHSLASVEAQKSHSVAGPSKPKVMAESTIQSFDAINHQRVRAGGNTSEGREYSRSVIHSLVASKPPRSHNGNELVESNEKGESSIYISDLNDKRQKIPARENPCEGGSKNRNYEDSVIQSVFRAKPQKSVPGEGSGEFKKDGEFSVPSSNVREYQKARAKKKYIEHRSNETSVIHSLPFGEQTFRPRGMLYECQECGECFAHSSDLTEHQKIHDREKPSGSRNYEWSVIRSLAPTDPQTSYAQEQYAKEQARNKCKDFRQFFATSEDLNTNQKIYDQEKSHGEESQGENTDGEETHSEETHGQETIEDPVIQGSDMEDPQKDDPDDKIYECEDCGLGFVDLTDLTDHQKVHSRKCLVDSREYTHSVIHTHSISEYQRDYTGEQLYECPKCGESFIHSSFLFEHQRIHEQDQLYSMKGCDDGFIALLPMKPRRNRAAERNPALAGSAIRCLLCGQGFIHSSALNEHMRLHREDDLLEQSQMAEEAIIPGLALTEFQRSQTEERLFECAVCGESFVNPAELADHVTVHKNEPYEYGSSYTHTSFLTEPLKGAIPFYECKDCGKSFIHSTVLTKHKELHLEEEEEDEAAAAAAAAAQEVEANVHVPQVVLRIQGLNVEAAEPEVEAAEPEVEAAEPEVEAAEPNGEAEGPDGEAAEPIGEAGQPNGEAEQPNGDADEPDGAGIEDPEERAEEPEGKAEEPEGDADEPDGVGIEDPEEGEDQEIQVEEPYYDCHECTETFTSSTAFSEHLKTHASMIIFEPANAFGECSGYIERASTSTGGANQADEKYFKCDVCGQLFNDHLSLARHQNTHTG

SEQ ID NO: 2692 - protein, 449 aa, Homo sapiens
GRPRSSSDNRNFLRERAGLSSAAVQTRIGNSAASRRSPAARPPVPAPPALPRGRPGTEGSTSLSAPAVLVVAVAVVVVVVSAVAWAMANYIHVPPGSPEVPKLNVTVQDQEEHRCREGALSLLQHLRPHWDPQEVTLQLFTDGITNKLIGCYVGNTMEDVVLVRIYGNKTELLVDRDEEVKSFRVLQAHGCAPQLYCTFNNGLCYEFIQGEALDPKHVCNPAIFRLIARQLAKIHAIHAHNGWIPKSNLWLKMGKYFSLIPTGFADEDINKRFLSDIPSSQILQEEMTWMKEILSNLGSPVVLCHNDLLCKNIIYNEKQGDVQFIDYEYSGYNYLAYDIGNHFNEFAGVSDVDYSLYPDRELQSQWLRAYLEAYKEFKGFGTEVTEKEVEILFIQVNQFALASHFFWGLWALIQAKYSTIEFDFLGYAIVRFNQYFKMKPEVTALKVPE

SEQ ID NO: 2693 - protein, 245 aa, Homo sapiens
PEAQTSAVLAREKGHLPTMRHEAPMQMASAQDARYGQKDSSDQNFDYMFKLLIIGNSSVGKTSFLFRYADDSFTSAFVSTVGIDFKVKTVFKNEKRIKLQIWDTAGQERYRTITTAYYRGAMGFILMYDITNEESFNAVQDWSTQIKTYSWDNAQVILVGNKCDMEDERVISTERGQHLGEQLGFEFFETSAKDNINVKQTFERLVDIICDKMSESLETDPAITAAKQNTRLKETPPPPQPNCAC

SEQ ID NO: 2694 - protein, 1378 aa, Homo sapiens
DRPPWNSRVDDFVTNLIHLSSKGHISPAKDTSLQQRTPAEMSPVLHFYVRPSGHEGAASGHTRRKLQGKLPELQGVETELCYNVNWTAEALPSAEETKKLMWLFGCPLLLDDVARESWLLPGSNDLLLEVGPRLNFSTPTSTNIVSVCRATGLGPVDRVETTRRYRLSFAHPPSAEVEAIALATLHDRMTEQHFPHPIQSFSPESMPEPLNGPINILGEGRLALEKANQELGLALDSWDLDFYTKRFQELQRNPSTVEAFDLAQSNSEHSRHWFFKGQLHVDGQKLVHSLFESIMSTQESSNPNNVLKFCDNSSAIQGKEVRFLRPEDPTRPSRFQQQQGLRHVVFTAETHNFPTGVCPFSGATTGTGGRIRDVQCTGRGAHVVAGTAGYCFGNLHIPGYNLPWEDLSFQYPGNFARPLEVAIEASNGASDYGNKFGEPVLAGFARSLGLQLPDGQRREWIKPIMFSGGIGSMEADHISKEAPEPGMEVVKVGGPVYRIGVGGGAASSVQVQGDNTSDLDFGAVQRGDPEMEQKMNRVIRACVEAPKGNPICSLHDQGAGGNGNVLKELSDPAGAIIYTSRFQLGDPTLNALEIWGAEYQESNALLLRSPNRDFLTHVSARERCPACFVGTITGDRRIVLVDDRECPVRRNGQGDAPPTPPPTPVDLELEWVLGKMPRKEFFLQRKPPMLQPLALPPGLSVHQALERVLRLPAVASKRYLTNKVDRSVGGLVAQQQCVGPLQTPLADVAVVALSHEELIGAATALGEQPVKSLLDPKVAARLAVAEALTNLVFALVTDLRDVKCSGNWMWAAKLPGEGAALADACEAMVAVMAALGVAVDGGKDSLSMAARVGTETVRAPGSLVISAYAVCPDITATVTPDLKHPEGRGHLLYVALSPGQHRLGGTALAQCFSQLGEHPPDLDLPENLVRAFSITQGLLKDRLLCSGHDVSDGGLVTCLLEMAFAGNCGLQVDVPVPRVDVLSVLFAEEPGLVLEVQEPDLAQVLKRYRDAGLHCLELGHTGEAGPHAMVRVSVNGAVVLEEPVGELRALWEETSFQLDRLQAEPRCVAEEERGLRERMGPSYCLPPTFPKASVPREPGGPSPRVAILREEGSNGDREMADAFHLAGFEVWDVTMQDLCSGAIGLDTFRGVAFVGGFSYADVLGSAKGWAAAVTFHPRAGAELRRFRKRPDTFSLGVCNGCQLLALLGWVGGDPNEDAAEMGPDSQPARPGLLLRHNLSGRYESRWASVRVGPGPALMLRGMEGAVLPVWSAHGEGYVAFSSPELQAQIEARGLAPLHWADDDGNPTEQYPLNPNGSPGGVAGICSCDGRHLAVMPHPERAVRPWQWAWRPPPFDTLTTSPWLQLFINARNWTLEGSC

SEQ ID NO: 2695 - protein, 192 aa, Homo sapiens
GVRGFWAGTMASRAGPRAAGTDGSDFQHRERVAMHYQMSVTLKYEIKKLIYVHLVIWLLLVAKMSVGHLRLLSHDQVAMPYQWEYPYLLSILPSLLGLLSFPRNNISYLVLSMISMGLFSIAPLIYGSMEMFPAAQQLYRHGKAYRFLFGFSAVSIMYLVLVLAVQVHAWQLYYSKKLLDSWFTSTQEKKHK

SEQ ID NO: 2696 - protein, 239 aa, Homo sapiens
DDFVRCGPQSAAMGASARLLRAVIMGAPGSGKGTVSSRITTHFELKHLSSGDLLRDNMLRGTEIGVLAKAFIDQGKLIPDDVMTRLALHELKNLTQYSWLLDGFPRTLPQAEALDRAYQIDTVINLNVPFEVIKQRLTARWIHPASGRVYNIEFNPPKTVGIDDLTGEPLIQREDDKPETVIKRLKAYEDQTKPVLEYYQKKGVLETFSGTETNKIWPYVYAFLQTKVPQRSQKASVTP

SEQ ID NO: 2697 - protein, 605 aa, Homo sapiens
KHRQENNALDMAPEIHMTGPMCLIENTNGELVANPEALKILSAITQPVVVVAIVGLYRTGKSYLMNKLAGKNKGFSLGSTVKSHTKGIWMWCVPHPKKPEHTLVLLDTEGLGDVKKGDNQNDSWIFTLAVLLSSTLVYNSMGTINQQAMDQLYYVTELTHRIRSKSSPDENENEDSADFVSFFPDFVWTLRDFSLDLEADGQPLTPDEYLEYSLKLTQGTSQKDKNFNLPRLCIRKFFPKKKCFVFDLPIHRRKLAQLEKLQDEELDPEFVQQVADFCSYIFSNSKTKTLSGGIKVNGPRLESLVLTYINAISRGDLPCMENAVLALAQIENSAAVQKAIAHYDQQMGQKVQLPAETLQELLDLHRVSEREATEVYMKNSFKDVDHLFQKKLAAQLDKKRDDFCKQNQEASSDRCSALLQVIFSPLEEEVKAGIYSKPGGYCLFIQKLQDLEKKYYEEPRKGIQAEEILQTYLKSKESVTDAILQTDQILTEKEKEIEVECVKAESAQASAKMVEEMQIKYQQMMEEKEKSYQEHVKQLTEKMERERAQLLEEQEKTLTSKLQEQARVLKERCQGESTQLQNEIQKLQKTLKKKTKRYMSHKLKI

SEQ ID NO: 2698 - protein, 295 aa, Homo sapiens
TQLPAPLSGVLSRLQLGSGAPLLTWVQETAGVAGGAPRRRTPVTMWRLLARASAPLLRVPLSDSWALLPASAGVKTLLPVPSFEDVSIPEKPKLRFIERAPLVPKVRREPKNLSDIRGPSTEATEFTEGNFAILALGGGYLHWGHFEMMRLTINRSMDPKNMFAIWRVPAPFKPITRKSVGHRMGGGKGAIDHYVTPVKAGRLVVEMGGRCEFEEVQGFLDQVAHKLPFAAKAVSRGTLEKMRKDQEERERNNQNPWTFERIATANMLGIRKVLSPYDLTHKGKYWGKFYMPKRV

SEQ ID NO: 2699 - protein, 375 aa, Homo sapiens
LRRNCSALGGLFQTIISDMKGSYPVWEDFINKAGKLQSQLRTTVVAAAAFLDAFQKVADMATNTRGGTREIGSALTRMCMRHRSIEAKLRQFSSALIDCLINPLQEQMEEWKKVANQLDKDHAKEYKKARQEIKKKSSDTLKLQKKAKKGRGDIQPQLDSALQDVNDKYLLLEETEKQAVRKALIEERGRFCTFISMLRPVIEEEISMLGEITHLQTISEDLKSLTMDPHKLPSSSEQVILDLKGSDYSWSYQTPPSSPSTTMSRKSSVCSSLNSVNSSDSRSSGSHSHSPSSHYRYRSSNLAQQAPVRLSSVSSHDSGFISQDAFQSKSPSPMPPEAPNQRRKEKREPDPNGGGPTTASGPPAAAEEAQRPRSM

SEQ ID NO: 2700 - protein, 149 aa, Homo sapiens
AGRGGPGKPVSWSSGPGSPGQTQRRSWVKSTRGHSSLLPPSQDFVAGLSVILRGTVDDRLNWAFNLYDLNKDGCITKEEMLDIMKSIYDMMGKYTYPALREEAPREHVESFFQKMDRNKDGVVTIEEFIESCQKDENIMRSMQLFDNVI
